(19) United States
(12) Patent Application Publication
(10) Pub. No.: US 2023/0313231 A1
(43) Pub. Date: Oct. 5, 2023

(54) RNA AND DNA BASE EDITING VIA ENGINEERED ADAR

(71) Applicant: The Regents of the University of California, Oakland, CA (US)

(72) Inventors: Prashant Mali, La Jolla, CA (US); Dhruva Katrekar, La Jolla, CA (US); Nathan Palmer, La Jolla, CA (US)

(21) Appl. No.: 18/025,169

(22) PCT Filed: Sep. 8, 2021
(86) PCT No.: PCT/US2021/049530

§ 371 Date: Mar. 7, 2023

Related U.S. Application Data
(60) Provisional application No. 63/075,717, filed on Sep. 8, 2020.

(51) Int. Cl. C12N 15/87; C12N 9/78; C12N 9/22; C12N 15/11; C12N 15/86

(52) U.S. Cl. CPC C12N 15/87; C12N 9/78; C12Y 305/04004; C12N 9/22; C12N 15/11; C12N 15/111; C12N 15/86; C12N 2320/33; C12N 2750/14143

(57) ABSTRACT

Disclosed herein are engineered ADAR systems for gene editing.

### CROSS-REFERENCE TO RELATED APPLICATIONS

[0001] This application claims the benefit of U.S. Provisional Appl. No. 63/075,717, filed Sep. 8, 2020, the disclosure of which is incorporated by reference herein in its entirety.

### STATEMENT REGARDING GOVERNMENT SUPPORT

[0002] This disclosure was made with government support under grant numbers CA222826, GM123313, and HG009285 awarded by the National Institutes of Health. The government has certain rights in the invention.

### TECHNICAL FIELD

[0003] The disclosure relates to engineered adenosine deaminases acting on RNA (ADAR) and methods of use thereof.

### INCORPORATION BY REFERENCE OF SEQUENCE LISTING

[0004] Accompanying this filing is a Sequence Listing entitled, “Sequence-Listing_ST25” created on Sep. 8, 2021 and having 671,321 bytes of data, machine formatted on IBM-PC, MS-Windows operating system. The sequence listing is hereby incorporated by reference in its entirety for all purposes.

### BACKGROUND

[0005] Adenosine to inosine (A-to-I) editing is a post-transcriptional modification in RNA that occurs in a variety of organisms, including humans. This A-to-I deamination of specific adenosines in double-stranded RNA is catalyzed by enzymes called adenosine deaminases acting on RNA (ADARs). Since inosine is structurally similar to guanosine, it is interpreted as a guanosine during the cellular processes of translation and splicing.

### SUMMARY

[0006] Adenosine deaminases acting on RNA (ADARs) can be repurposed to enable programmable RNA editing, however their exogenous delivery may lead to transcriptome-wide off-targeting, and additionally, enzymatic activity on certain RNA motifs, especially those flanked by a 5′ guanosine may be very low thus limiting their utility as a transcriptome engineering toolset. To address this, a comprehensive ADAR2 protein engineering techniques were undertaken via three approaches: First, a deep mutational scan of the deaminase domain that enabled direct coupling of variants to corresponding RNA editing activity was performed. Experimentally measuring the impact of every amino acid substitution across 261 residues, ˜5000 variants, on RNA editing, revealed intrinsic domain properties, and also several mutations that greatly enhanced RNA editing. Second, a domain-wide mutagenesis screen was performed to identify variants that increased activity at 5′-GA-3′ motifs, and discovered novel mutants that enabled robust RNA editing. Third, the domain was engineered at the fragment level to create split deaminases. Notably, compared to full-length deaminase overexpression, split-deaminases resulted in >1000 fold more specific RNA editing.

[0007] The disclosure provides an isolated polypeptide comprising a sequence selected from the group consisting of: (i) a sequence that is at least 85% identical to SEQ ID NO:2 and having a E488X₁ mutation and a N496X₂ mutation, wherein X₁ is Q, H, R, K, N, A, M, S, F, L, or W and X₂ is F or Y or a catalytic domain thereof and wherein the polypeptide performs a chemical modification to a nucleotide; (ii) a sequence of SEQ ID NO:2 and having a E488X₁ mutation and a N496X₂ mutation, wherein X₁ is Q, H, R, K, N, A, M, S, F, L, or W and X₂ is F or Y or a catalytic domain and wherein the polypeptide performs a chemical modification to a nucleotide; (iii) a sequence that is at least 85% identical SEQ ID NO:2 from amino acid 316-697 and having a E488X₁ mutation and a N496X₂ mutation, wherein X₁ is Q, H, R, K, N, A, M, S, F, L, or W and X₂ is F or Y or a catalytic domain and wherein the polypeptide performs a chemical modification to a nucleotide; and (iv) a sequence of SEQ ID NO:2 from amino acid 316-697 and having a E488X₁ mutation and a N496X₂ mutation, wherein X₁ is Q, H, R, K, N, A, M, S, F, L, or W and X₂ is F or Y or a catalytic domain and wherein the polypeptide performs a chemical modification to a nucleotide. In one embodiment, the isolated polypeptide further comprises one or more additional mutations selected from the group consisting of: G336D, G487A, G487V, T490C, T490S, V493T, V493S, V493A, V493R, V493D, V493P, V493G, N597K, N597R, N597A, N597E, N597H, N597G, N597Y, A589V, S599T, N613K, N613R, N613A, and N613E of SEQ ID NO:2. In another embodiment, the isolated polypeptide further comprises one or more additional mutations at R348, V351, T375, K376, E396, C451, R455, N473, R474, K475, R477, R481, S486, T490, S495, and/or R510.

[0008] The disclosure provides an isolated polypeptide comprising a sequence selected from the group consisting of: (i) a sequence that is at least 85%, 87%, 90%, 92%, 95%, 98%, or 99% identical to SEQ ID NO:4 and having a E1008X₁ mutation and a S1016X₂ mutation, wherein X₁ is Q, H, R, K, N, A, M, S, F, L, or W and X₂ is F or Y or a catalytic domain and wherein the polypeptide performs a chemical modification to a nucleotide; (ii) a sequence of SEQ ID NO:4 and having a E1008X₁ mutation and a S1016X₂ mutation, wherein X₁ is Q, H, R, K, N, A, M, S, F, L, or W and X₂ is F or Y or a catalytic domain and wherein the polypeptide performs a chemical modification to a nucleotide; (iii) a sequence that is at least 85%, 87%, 90%, 92%, 95%, 98%, or 99% identical SEQ ID NO:4 from amino acid 886-1221 and having a E1008X₁ mutation and a S1016X₂ mutation, wherein X₁ is Q, H, R, K, N, A, M, S, F, L, or W and X₂ is F or Y or a catalytic domain and wherein the polypeptide performs a chemical modification to a nucleotide; and (iv) a sequence of SEQ ID NO:4 from amino acid 886-1221 and having a E1008X₁ mutation and a S1016X₂ mutation, wherein X₁ is Q, H, R, K, N, A, M, S, F, L, or W and X₂ is F or Y or a catalytic domain and wherein the polypeptide performs a chemical modification to a nucleotide.

[0009] The disclosure provides a composition comprising an isolated polypeptide of the disclosure and a polynucleotide.

[0010] The disclosure also provides an isolated polynucleotide encoding the polypeptide as described herein. In one embodiment, the polynucleotide hybridizes under moderate to stringent conditions to polynucleotide consisting of SEQ ID NO:1 or 3. The disclosure also provides a vector comprising the isolated polynucleotide of the disclosure. The disclosure provides a host cell comprising a polynucleotide of the disclosure or a vector of the disclosure.

[0011] The disclosure provides a recombinant polypeptide having a sequence that is at least 85% identical to SEQ ID NO:2 from about amino acid 316 to 465, 466, 467, 468, or 469. In one embodiment, the polypeptide comprises a sequence that is at least 85% identical to SEQ ID NO: 10. In another or further embodiment, the polypeptide is at least 85% identical to SEQ ID NO: 10 and has a E21X₁ mutation and a N29X₂ mutation, wherein X₁ is Q, H, R, K, N, A, M, S, F, L, or W and X₂ is F or Y. In still another or further embodiment the polypeptide comprises a tethering moiety. In a further embodiment, the tethering moiety comprises a MS2 coat protein peptide, a PP7 peptide, a LambdaN peptide, a tet peptide, a Cas protein or a programmable PUF domain.

[0012] The disclosure provides a recombinant polypeptide having a sequence that is at least 85% identical to SEQ ID NO:2 from about amino acid 466, 467, 468, 469, or 470 to amino acid 701. In one embodiment, the polypeptide comprises a sequence that is at least 85% identical to SEQ ID NO:8. In another or further embodiment, the polypeptide comprises a tethering moiety. In a further embodiment, the tethering moiety comprises a MS2 coat protein peptide, a PP7 peptide, a LambdaN peptide, a tet peptide, a Cas protein or a programmable PUF domain.

[0013] The disclosure provides an isolated polynucleotides) encoding a polypeptide as described above. The disclosure further provides at least one vector comprising the polynucleotides as well as host cells comprising the polynucleotide(s) or vector(s).

[0014] The disclosure provides an engineered, non-naturally occurring system suitable for modifying a target RNA, comprising: a first polypeptide having a sequence that is at least 85% identical to SEQ ID NO:10 and has a E21X₁ mutation and a N29X₂ mutation, wherein X₁ is Q, H, R, K, N, A, M, S, F, L, or W and X₂ is F or Y, operably linked to a first tethering moiety or a nucleotide sequence encoding the first polypeptide operably linked to a first tethering moiety; a second polypeptide having a sequence that is at least 85% identical to SEQ ID NO:8 operably linked to a second tethering moiety or a nucleotide sequence encoding the second polypeptide operably linked to the second tethering moiety; and a guide RNA comprising a guide sequence having a degree of complementarity with a target RNA that comprises an adenine or cytidine and having at a first end a cognate to the first tethering moiety and at the opposite second end a cognate to the second tethering moiety; wherein said first and second polypeptide interact with the guide RNA at the target RNA to modify the target RNA.

[0015] The disclosure provides an engineered, non-naturally occurring system suitable for modifying a target RNA, comprising: a polypeptide of the disclosure (e.g., any of SEQ ID Nos:29-98) or catalytic domain thereof, or a nucleotide sequence encoding the polypeptide or catalytic domain thereof; and a guide RNA comprising a guide sequence having a degree of complementarity with a target RNA that comprises an adenine or cytidine; wherein said polypeptide or catalytic domain thereof interacts with the guide RNA at the target RNA to modify the target RNA. In one embodiment, the guide RNA comprises a non-pairing nucleotide at a position corresponding to said adenosine or cytidine resulting in a mismatch in a double stranded substrate formed between the guide RNA and the target RNA. In another embodiment, the system comprises one or more vectors comprising: (i) a first regulatory element operably linked to a nucleotide sequence encoding the guide molecule; (ii) a second regulatory element operably linked to a nucleotide sequence encoding the first polypeptide; and (iii) an optional third regulatory element operably linked to a nucleotide sequence encoding the second polypeptide, wherein the nucleotide sequence encoding the second polypeptide is under control of the second or third regulatory element. In yet a further embodiment, the nucleotide sequence encoding the first polypeptide and the nucleotide sequence encoding the second polypeptide are separated by a linker sequence encoding a cleavable peptide. In still another or further embodiment, the cleavable peptide is a 2A or 2A-like peptide sequence. In still another embodiment, the first polypeptide, second polypeptide are fused to the first tethering moiety and second tethering moiety, respectively, by a linker. In yet another embodiment, the first and second tethering moieties are independently selected from the group consisting of MS2, Cas, PP7, Qβ, F2, GA, fr, JP501, M12, R17, BZ13, JP34, JP500, KU1, M11, MX1, TW18, VK, SP, FI, ID2, NL95, TW19, AP205, φCb5, φCb8r, φCb12r, φCb23r, 7s and PRR1 and wherein the first and second tethering moieties are not the same. In still another or further embodiment, the guide sequence has a length of from about 10 to about 100 nucleotides. In still another or further embodiment, the polypeptide, first polypeptide and/or second polypeptide further comprises one or more nuclear export signal(s) (NES(s)) or nuclear localization signal(s) (NLS(s)).

[0016] The disclosure also provides a method of modifying a protein encoded by a target RNA comprising: contacting the target RNA with a system of the disclosure (e.g., comprising a recombinant ADAR or split ADAR system). In one embodiment, the modifying of the protein treat or prevents a disease or disorder. In a further embodiment, the disease is selected from cystic fibrosis, albinism, alpha-1-antitrypsin deficiency, Alzheimer disease, Amyotrophic lateral sclerosis, Asthma, 0-thalassemia, Cadasil syndrome, Charcot-Marie-Tooth disease, Chronic Obstructive Pulmonary Disease (COPD), Distal Spinal Muscular Atrophy (DSMA), Duchenne/Becker muscular dystrophy, Dystrophic Epidermolysis bullosa, Epidermylosis bullosa, Fabry disease, Factor V Leiden associated disorders, Familial Adenomatous, Polyposis, Galactosemia, Gaucher's Disease, Glucose-6-phosphate dehydrogenase, Haemophilia, Hereditary Hematochromatosis, Hunter Syndrome, Huntington's disease, Hurler Syndrome, Inflammatory Bowel Disease (IBD), Inherited polyagglutination syndrome, Leber congenital amaurosis, Lesch-Nyhan syndrome, Lynch syndrome, Marfan syndrome, Mucopolysaccharidosis, Muscular Dystrophy, Myotonic dystrophy types I and II, neurofibromatosis, Niemann-Pick disease type A, B and C, NY-esol related cancer, Parkinson's disease, Peutz-Jeghers Syndrome, Phenylketonuria, Pompe's disease, Primary Ciliary Disease, Prothrombin mutation related disorders, such as the Prothrombin G20210A mutation, Pulmonary Hypertension, Retinitis Pigmentosa, Sandhoff Disease, Severe Combined Immune Deficiency Syndrome (SCID), Sickle Cell Anemia, Spinal Muscular Atrophy, Stargardt's Disease, Tay-Sachs Disease, Usher syndrome, X-linked immunodeficiency, various forms of cancer (e.g. BRCA1 and 2 linked breast cancer and ovarian cancer), an ornithine transcarbamylase deficiency, Alzheimer's disease, pain, and Rett syndrome.

[0017] The disclosure also provides a method for modifying a target site within a DNA-RNA hybrid molecule, the method comprising contacting the hybrid molecule with an adenosine deaminase that acts on RNA (ADAR), wherein the ADAR comprises a recombinant, engineered or split ADAR polypeptide system of the disclosure. In one embodiment, the ADAR comprises an ADAR catalytic domain of SEQ ID NO:2 from amino acid 316 to 701. In another embodiment, modifying the target site comprises modifying the DNA strand of the hybrid molecule.

[0018] The disclosure provides a composition comprising (i) a first fusion protein comprising a polypeptide comprising a portion of an ADAR catalytic domain of the disclosure operably linked to a first tethering moiety and a second fusion protein comprising a second portion of an ADAR catalytic domain of the disclosure operably linked to a second tethering moiety, or (ii) at least one polynucleotide encoding (i); wherein the first and second tethering moieties are different.

[0019] The disclosure provides an isolated polypeptide comprising an amino acid sequence with a first mutation at position 488 of SEQ ID NO:2 and a second mutation at position 496 of SEQ ID NO:2, wherein the first mutation is a Q, H, R, K, N, A, M, S, F, L, or W mutation and the second mutation is an F or Y mutation, wherein excluding the first mutation and the second mutation, the polypeptide has at least about 85% sequence identity to SEQ ID NO:2, and wherein the polypeptide deaminates an adenosine in a nucleotide of a double stranded nucleic acid substrate, as determined by an in vitro assay.

[0020] The disclosure provides an isolated polypeptide comprising an amino acid sequence with a first mutation at position 1008 of SEQ ID NO:4 and a second mutation at position 1016 of SEQ ID NO:4, wherein the first mutation is a Q, H, R, K, N, A, M, S, F, L, or W mutation and the second mutation is an F or Y mutation, wherein excluding the first mutation and the second mutation, the polypeptide has at least about 85% sequence identity to SEQ ID NO:4, and wherein the polypeptide deaminates an adenosine in a nucleotide of a double stranded nucleic acid substrate, as determined by an in vitro assay.

### BRIEF DESCRIPTION OF THE DRAWINGS

[0021] FIG. 1A-B shows (A) Schematic of the deep mutational scanning approach. HEK293FT cells were transduced with the MS2-adRNA lentiviruses at a high MOI and a single clone was selected based on mCherry expression. These cells bearing the MS2-adRNA were then transduced with the lentiviral library of MCP-ADAR2-DD-NES variants at a low MOI to ensure delivery of a single variant per cell. Upon translation in the cell, each MCP-ADAR2-DD variant, in combination with the MS2-adRNA, edited its own transcript creating a synonymous change. These transcripts were then sequenced to quantify the editing efficiency associated with each variant. (B) Heatmaps illustrating impact of single amino acid substitutions in residues 340-600 on the ability of the ADAR2-DD to edit a UAG motif. Rectangles are colored according to the scale bar on the right depicting the Z-score for editing a UAG motif as compared to the ADAR2-DD. Diagonal bars indicate standard error. The amino acids in the wild-type ADAR2-DD are indicated in the heatmap with a ⋅. Amino acids are indicated on the left and grouped based on type of amino acid: positively charged, negatively charged, polar-neutral, non-polar, aromatic and unique. The heatmap bars at the top represent amino acid conservation score and surface exposure respectively.

[0022] FIG. 2A-E shows (A) Structure of the ADAR2-DD bound to its substrate (PDB 5HP3) with the degree of mutability of each residue as measured by the DMS highlighted. Residues that are highly intolerant to mutations are colored red while residues that are highly mutable are colored yellow. Residues not assayed in this DMS are colored white. (B) List of mutants from the pooled DMS screens were individually validated in an arrayed luciferase assay using a cluc reporter bearing a UAG stop codon. The plots represent fold change as compared to the wild-type ADAR2 for (i) the arrayed luciferase assay and (ii) the DMS screen. Values represent mean+/−SEM for the luciferase assay (n>2) and mean for the DMS (n=2). (C) Using the library chassis of the DMS, a screen of deaminase domain mutants (in an E488Q background) was performed to mine variants with improved activity against 5′-GA-3′ RNA motifs. (D) Structure of the ADAR2-DD(E488Q) bound to its substrate (PDB 5ED1) with the N496 residue highlighted in red, the E488Q residue in cyan, the target adenosine in green, the orphaned cytosine in magenta and the adenosine on the unedited strand that base pairs with the 5′ uracil flanking the target adenosine in orange. (E) (i) The N496F, E488Q mutant was validated in a luciferase assay using a cluc reporter bearing a UGA stop codon. The plot represents fold change as compared to the ADAR2-DD(E488Q). Values represent mean+/−SEM (n=6). (ii) Editing of a GAC motif in the 3′UTR of the RAB7A transcript, and (iii) a GAG motif in the CDS of the KRAS transcript. Values represent mean+/−SEM (n=3). P-values were computed using a two-tailed unpaired t-test. All experiments were carried out in HEK293FT cells.

[0023] FIG. 3A-D shows (A) Schematic of the split-ADAR2 engineering approach. (B) Sequence of the ADAR2-DD. The protein was split between residues labelled in red, and a total of 18 pairs were evaluated. (C) The ability of each split pair from (B) to correct a premature stop codon when transfected with a chimeric BoxB-MS2 adRNA was assayed via a luciferase assay. The pairs 1-18 correspond to the residues in red in (B) in the order in which they appear. The residues in (B) in bold red correspond to pairs 9-12. Values represent mean (n=2). (D) Engineering of humanized split-ADAR2 variant based on pair 12 and assayed of its ability to correct a stop codon in the cluc transcript. Values represent mean (n=2). All experiments were carried out in HEK293FT cells.

[0024] FIG. 4A-D shows (A) The components of the split-ADAR2 system based on pair 12 were tested for their ability to edit the RAB7A transcript. Editing was observed only when every component was delivered. Values represent mean+/−SEM (n=3). (B) 2D histograms comparing the transcriptome-wide A-to-G editing yields observed with each construct (y-axis) to the yields observed with the control sample (x-axis). Each histogram represents the same set of reference sites, where read coverage was at least 10 and at least one putative editing event was detected in at least one sample. Bins highlighted in red contain sites with significant changes in A-to-G editing yields when comparing treatment to control sample. Red crosses in each plot indicate the 100 sites with the smallest adjusted P values. Blue circles indicate the intended target A site within the RAB7A transcript. All experiments were carried out in HEK293FT cells. (C) The split-ADAR2 system was assayed for editing the KRAS and CKB transcripts. Values represent mean+/−SEM (n=3). (D) A split-RESCUE was engineered based on pair 12 and assayed for C-to-U editing of the RAB7A transcript. Values represent mean+/−SEM (n=3).

[0025] FIG. 5A-D shows (A) Schematic of the ADAR2-DD showing oligonucleotide pools used to create the DMS library along with editing sites and primer binding sites. Oligonucleotide libraries 1, 2 and 3 were assayed for editing at the sites located at the 5′ end while libraries 4, 5 and 6 were assayed for editing at the 3′ end. Libraries 1 and 2 were amplified using primers 5′ seq F and 5′ seq R2, library 3 with 5′ seq F and 5′ seq R, library 4 with 3′ seq F and 3′ seq R and libraries 5 and 6 with 3′ seq F2 and 3′ seq R. (B) Library coverage of the ADAR2-DD DMS plasmids. (C) Histogram of variant counts from the DMS. 4958 of the 4959 variants were detected. (D) Replicate correlation for the ADAR2-DD DMS. The X and Y axes on every plot represent the fraction of edited reads.

[0026] FIG. 6 shows heatmaps illustrating how single amino acid substitutions in residues 340-600 impact the ability of the ADAR2-DD to edit a UAG motif. Rectangles are colored according to the scale bar on the bottom right depicting the geometric mean of log 2 fold change in editing efficiency as compared to the ADAR2-DD. The amino acids in the wild-type ADAR2-DD are indicated in the heatmap with a ⋅. Amino acids are indicated on the left and grouped based on type of amino acid: positively charged, negatively charged, polar-neutral, non-polar, aromatic and unique.

[0027] FIG. 7 shows a heatmap depicting hyper-editing observed with the N496F, E488Q double mutant corresponding to the RAB7A plot in FIG. 2e. The red arrow indicates the target.

[0028] FIG. 8A-B shows (A) All components of the split-ADAR2 system were tested for their ability to edit RNA via the luciferase assay. Restoration of luciferase activity is observed only when every component is delivered. Values represent mean (n=2). (B) The importance of orientation of the N- and C-terminal fragments in forming a functional ADAR2-DD is assayed via the luciferase assay. Chimeric and non-chimeric adRNA are used to recruit the split-ADAR2 pairs. Values represent mean (n=2).

[0029] FIG. 9A-B shows (A) Heatmap depicting hyper-editing observed with the split-ADAR2 system corresponding to the plot in FIG. 4a. The red arrow indicates the target adenosine. (B) 2D histograms comparing the transcriptome-wide A-to-G editing yields observed with each construct from FIG. 4a (y-axis) to the yields observed with the control sample (x-axis). Each histogram represents the same set of 22583 reference sites, where read coverage was at least 10 and at least one putative editing event was detected in at least one sample. Bins highlighted in red contain sites with significant changes in A-to-G editing yields when comparing treatment to control sample. Red crosses in each plot indicate the 100 sites with the smallest adjusted p-values. Blue circles indicate the intended target A-site within the RAB7A transcript. Large counts in bins near the lower-left corner likely correspond not only to low editing yields in both test and control samples, but also to sequencing errors and alignment errors. Large counts in bins near the upper-right corner of each plot likely correspond to homozygous single nucleotide polymorphisms (SNPs), as well as other differences between the reference genome and the genome of the HEK293FT cell line used in the experiments.

[0030] FIG. 10 shows 2D histograms comparing the transcriptome-wide A-to-G editing yields observed with each split-ADAR2 construct (y-axis) to the yields observed with the control sample (x-axis).

[0031] FIG. 11A-D shows (A) The split-ADAR2(E488Q, N496F) system was assayed for editing a GAC site in the RAB7A transcript. Values represent mean+/−SEM (n=3). (B) 2D histograms comparing the transcriptome-wide A-to-G editing yields observed with the full-length and split ADAR2(E488Q, N496F) constructs (y-axis) to the yields observed with the control sample (x-axis). (C) A split-RESCUE was engineered and assayed for C-to-U editing of the RAB7A transcript. Values represent mean+/−SEM (n=3). (D) 2D histograms comparing the transcriptome-wide A-to-G and C-to-U editing yields observed with the full-length and split RESCUE constructs (y-axis) to the yields observed with the control sample (x-axis). All experiments were carried out in HEK293FT cells.

[0032] FIG. 12A-B shows (A) Heatmap depicting hyper-editing observed with the split-ADAR2 system corresponding to the plot in FIG. 4a. The red arrow indicates the target adenosine. (B) 2D histograms comparing the transcriptome-wide A-to-G editing yields observed with each construct from FIG. 4a (y-axis) to the yields observed with the control sample (x-axis). Each histogram represents the same set of 25753 reference sites, where read coverage was at least 10 and at least one putative editing event was detected in at least one sample. Bins highlighted in red contain sites with significant changes in A-to-G editing yields when comparing treatment to control sample. Crosses in each plot indicate the 100 sites with the smallest adjusted p-values. Circles indicate the intended target A-site within the RAB7A transcript. Large counts in bins near the lower-left corner likely correspond not only to low editing yields in both test and control samples, but also to sequencing errors and alignment errors. Large counts in bins near the upper-right corner of each plot likely correspond to homozygous single nucleotide polymorphisms (SNPs), as well as other differences between the reference genome and the genome of the HEK293FT cell line used in the experiments.

[0033] FIG. 13 shows 2D histograms comparing the transcriptome-wide A-to-G editing yields observed with each split-ADAR2 construct (y-axis) to the yields observed with the control sample (x-axis). Blue circles indicate the intended target A-site within the RAB7A transcript.

[0034] FIG. 14 shows 2D histograms comparing the transcriptome-wide A-to-G editing yields observed with each split-ADAR2 construct (y-axis) to the yields observed with the control sample (x-axis). Blue circles indicate the intended target A-site within the KRAS transcript.

[0035] FIG. 15 shows 2D histograms comparing the transcriptome-wide A-to-G editing yields observed with split-ADAR2 (E488Q, N496F) or split-RESCUE (y-axis) to the yields observed with the control sample (x-axis). Blue circles indicate the intended target A-site within the RAB7A transcript. Additionally, C-to-U editing yields observed with split-RESCUE were also quantified.

### DETAILED DESCRIPTION

[0036] Unless defined otherwise, all technical and scientific terms used herein have the same meanings as commonly understood by one of ordinary skill in the art to which this disclosure belongs. All nucleotide sequences provided herein are presented in the 5′ to 3′ direction unless identified otherwise. Although any methods and materials similar or equivalent to those described herein can be used in the practice or testing of the disclosure, the preferred methods, devices, and materials are now described. All technical and patent publications cited herein are incorporated herein by reference in their entirety. Nothing herein is to be construed as an admission that the disclosure is not entitled to antedate such disclosures.

[0037] The practice of the technology will employ, unless otherwise indicated, some conventional techniques of tissue culture, immunology, molecular biology, microbiology, cell biology, and recombinant DNA. See, e.g., Green and Sambrook eds. (2012) Molecular Cloning: A Laboratory Manual, 4th edition; the series Ausubel et al. eds. (2015) Current Protocols in Molecular Biology; the series Methods in Enzymology (Academic Press, Inc., N.Y.); MacPherson et al. (2015) PCR 1: A Practical Approach (IRL Press at Oxford University Press); MacPherson et al. (1995) PCR 2: A Practical Approach; McPherson et al. (2006) PCR: The Basics (Garland Science); Harlow and Lane eds. (1999) Antibodies, A Laboratory Manual; Greenfield ed. (2014) Antibodies, A Laboratory Manual; Freshney (2010) Culture of Animal Cells: A Manual of Basic Technique, 6th edition; Gait ed. (1984) Oligonucleotide Synthesis; U.S. Pat. No. 4,683,195; Hames and Higgins eds. (1984) Nucleic Acid Hybridization; Anderson (1999) Nucleic Acid Hybridization; Herdewijn ed. (2005) Oligonucleotide Synthesis: Methods and Applications; Hames and Higgins eds. (1984) Transcription and Translation; Buzdin and Lukyanov ed. (2007) Nucleic Acids Hybridization: Modern Applications; Immobilized Cells and Enzymes (IRL Press (1986)); Grandi ed. (2007) In vitro Transcription and Translation Protocols, 2nd edition; Guisan ed. (2006) Immobilization of Enzymes and Cells; Perbal (1988) A Practical Guide to Molecular Cloning, 2nd edition; Miller and Calos eds, (1987) Gene Transfer Vectors for Mammalian Cells (Cold Spring Harbor Laboratory); Makrides ed. (2003) Gene Transfer and Expression in Mammalian Cells; Mayer and Walker eds. (1987) Immunochemical Methods in Cell and Molecular Biology (Academic Press, London); Lundblad and Macdonald eds. (2010) Handbook of Biochemistry and Molecular Biology, 4th edition; Herzenberg et al. eds (1996) Weir's Handbook of Experimental Immunology, 5th ed.; and/or more recent editions thereof.

[0038] The terminology used in the description herein is for the purpose of describing particular embodiments only and is not intended to be limiting of the disclosure.

[0039] All numerical designations, e.g., pH, temperature, time, concentration, and molecular weight, including ranges, are approximations which are varied (+) or (−) by increments of 1.0 or 0.1, as appropriate or alternatively by a variation of +/−15%, or alternatively 10% or alternatively 5% or alternatively 2%.

[0040] Unless the context indicates otherwise, it is specifically intended that the various features of the disclosure described herein can be used in any combination. Moreover, the disclosure also contemplates that in some embodiments, any feature or combination of features set forth herein can be excluded or omitted. To illustrate, if the specification states that a complex comprises components A, B and C, it is specifically intended that any of A, B or C, or a combination thereof, can be omitted and disclaimed singularly or in any combination.

[0041] Unless indicated otherwise, all specified embodiments, features, and terms intend to include both the recited embodiment, feature, or term and biological equivalents thereof.

[0042] As used in the specification and claims, the singular form “a”, “an” and “the” include plural references unless the context dictates otherwise. For example, the term “a polypeptide” includes a plurality of polypeptides, including mixtures thereof.

[0043] The term “about,” as used herein can mean within an acceptable error range for the particular value as determined by one of ordinary skill in the art, which can depend in part on how the value is measured or determined, e.g., the limitations of the measurement system. For example, “about” can mean plus or minus 10%, per the practice in the art. Alternatively, “about” can mean a range of plus or minus 20%, plus or minus 10%, plus or minus 5%, or plus or minus 1% of a given value. Alternatively, particularly with respect to biological systems or processes, the term can mean within an order of magnitude, within 5-fold, or within 2-fold, of a value. Where particular values are described in the application and claims, unless otherwise stated the term “about” meaning within an acceptable error range for the particular value can be assumed. Also, where ranges and/or subranges of values are provided, the ranges and/or subranges can include the endpoints of the ranges and/or subranges. In some cases, variations can include an amount or concentration of 20%, 10%, 5%, 1%, 0.5%, or even 0.1% of the specified amount. It is to be understood, although not always explicitly stated, that all numerical designations are preceded by the term “about”. It also is to be understood, although not always explicitly stated, that the reagents described herein are merely exemplary and that equivalents of such are known in the art. When the term “about” is used with reference to an amino acid or nucleic acid position in polymeric sequence, the term is meant to include the specifically recited residue and 1-2, 2-5, 5-10 or 10-20 residues or nucleotide on either end of the specifically recited position.

[0044] For the recitation of numeric ranges herein, each intervening number there between with the same degree of precision is explicitly contemplated. For example, for the range of 6-9, the numbers 7 and 8 are contemplated in addition to 6 and 9, and for the range 6.0-7.0, the number 6.0, 6.1, 6.2, 6.3, 6.4, 6.5, 6.6, 6.7, 6.8, 6.9, and 7.0 are explicitly contemplated.

[0045] The term “adapter pair,” “tethering pair,” “anchor moiety,” and “tether moiety” refers to binding pairs (cognate pairs) that serve as handles or adapters on a molecule such that when an adapter pair is colocalized they bind/interact with one another thereby bringing any molecule linked/tethered to each adapter of the pair into proximity. For example, an adapter pair can be selected from the group consisting of: MS2 coat protein (SEQ ID NO:12) and SEQ ID NO:13 or 14; one or more LambdaN proteins (SEQ ID NO:16, 18, 20, or 22) and nutL-BoxB (SEQ ID NO:23) and nutR BoxB (SEQ ID NO:24); and PP7 coat protein and SEQ ID NO:25. Another pair is the tet/TAR pair, wherein the tet peptide is 15-17 amino acids sequence (SEQ ID NO:27) from the BIV Tat protein that binds the TAR element (SEQ ID NO:28). Other adapter pairs can be utilized (see, e.g., Bos et al., Adv. Exp. Med. Biol. 907:61-88, 2016, which is incorporated herein by reference). Programmable PUF domains can also be programmed such that their protein sequence can be designed to bind to a selected RNA sequence (see, e.g., Zhou et al., Nature Communication, 12:5107, 2021, the disclosure of which is incorporated herein by reference). Exemplary tethering systems include: MS2, PP7, Qβ, F2, GA, fr, JP501, M12, R17, BZ13, JP34, JP500, KU1, M11, MX1, TW18, VK, SP, FI, ID2, NL95, TW19, AP205, pCb5, pCb8r, pCb12r, pCb23r, 7s and PRR1.

[0046] In another embodiment, a tethering system can use a Cas (e.g., dCas13b) domain linked to a first portion of a catalytic domain of the disclosure and a second tethering moiety (e.g., MS2, PP7, Qβ, F2, GA, fr, JP501, M12, R17, BZ13, JP34, JP500, KU1, M11, MX1, TW18, VK, SP, FI, ID2, NL95, TW19, AP205, φCb5, φCb8r, φCb12r, φCb23r, 7s or PRR1), linked to a second domain of a catalytic domain of a split ADAR system of the disclosure. In this embodiment, the guide RNA molecules will include a RNA loop (CRISPR) recognized by the Cas (e.g., dCas13b) domain and a second RNA domain recognized by the second tethering moiety.

[0047] The terms “adenine”, “guanine”, “cytosine”, “thymine”, “uracil” and “hypoxanthine” (the nucleobase in inosine) as used herein refer to the nucleobases as such.

[0048] The terms “adenosine”, “guanosine”, “cytidine”, “thymidine”, “uridine” and “inosine”, refer to the nucleobases linked to the (deoxy)ribosyl sugar.

[0049] The term “adeno-associated virus” or “AAV” as used herein refers to a member of the class of viruses associated with this name and belonging to the genus dependoparvovirus, family Parvoviridae. Multiple serotypes of this virus are known to be suitable for gene delivery; all known serotypes can infect cells from various tissue types. Non-limiting exemplary serotypes useful for the purposes disclosed herein include any of the 11 serotypes, e.g., AAV2 and AAV8.

[0050] The term “adenosine deaminases acting on RNA” or “ADAR” as used herein can refer to an adenosine deaminase that can convert adenosines (A) to inosines (I) in an RNA sequence. ADAR1 and ADAR2 are two exemplary species of ADAR that are involved in mRNA editing in vivo. Non-limiting exemplary sequences for ADAR1 can be found under the following reference numbers: HGNC: 225; Entrez Gene: 103; Ensembl: ENSG 00000160710; OMIM: 146920; UniProtKB: P55265; and GeneCards: GC01M154554, as well as biological equivalents thereof. Non-limiting exemplary sequences for ADAR2 can be found under the following reference numbers: HGNC: 226; Entrez Gene: 104; Ensembl: ENSG00000197381; OMIM: 601218; UniProtKB: P78563; and GeneCards: GC21P045073, as well as biological equivalents thereof. ADAR1 and ADAR2 which are both catalytically active, are found in many different tissue types. ADAR1 has two known isoforms: ADAR1p110 (nucleic acid sequence: SEQ ID NO:5; polypeptide sequence: SEQ ID NO:6), which is localized to the nucleus, and ADAR1p150 (nucleic acid sequence: SEQ ID NO:3; polypeptide sequence: SEQ ID NO:4), which is found in both the nucleus and cytoplasm of cells. The active site of ADAR contains two or three N-terminal dsRNA binding domains (dsRBDs) and a C-terminal catalytic deaminase domain. ADAR1 contains three regions that bind double-stranded helical RNA (dsRBDs) and two Z-DNA binding domains.

[0051] The term “ADAR catalytic domain” refers to the portion of an ADAR that comprises the enzyme's C-terminal catalytic deaminase domain. As a non-limiting example, the catalytic deaminase domain of ADAR1 comprises amino acids 886-1221 of SEQ ID NO:4. As another non-limiting example the catalytic deaminase domain of ADAR2 comprises amino acids 316-697 of SEQ ID NO:2. Further non-limited exemplary sequences of the catalytic domain are provided herein.

[0052] ADAR2 comprises the following sequence, wherein bold-underlined sequence reflects the dsRBD domains and the bold-underlined-italicized reflects the catalytic domain and the circled residue depicts a mutation site; ADAR2 (SEQ ID NO:2):

```
                10 20 30 40
MDIEDEENMS SSSTDVKENR NLDNVSPKDG STPGPGEGSQ
                50 60 70 80
LSNGGGGGPG RKRPLEEGSN GHSKYRLKKR RKTPGPVLPK
                90 100 110 120
NALMQLNEIK PGLQYTLLSQ TGPVHAPLFV MSVEVNGQVF
              130 140 150 160
EGSGPTKKKA KLHAAEKALR SFVQFPNASE AHLAMGRTLS
              170 180 190 200
VNTDFTSDQA DFPDTLFNGF ETPDKAEPPF YVGSNGDDSF
              210 220 230 240
SSSGDLSLSA SPVPASLAQP PLPVLPPFPP PSGKNPVMIL
              250 260 270 280
NELRPGLKYD FLSESGESHA KSFVMSVVVD GQFFEGSGRN
              290 300 310 320
KKLAKARAAQ SALAAIFNLH LDQTPSRQPI PSEGL [symbol]
              330 340 350 360

[symbol]

[symbol]

[symbol]

[symbol]

              370 380 390 400

[symbol]

[symbol]

[symbol]

[symbol]

              410 420 430 440

[symbol]

[symbol]

[symbol]

[symbol]

              450 460 470 480

[symbol]

[symbol]

[symbol]

[symbol]

              490 500 510 520

[symbol]

[symbol]

[symbol]

[symbol]

              530 540 550 560

[symbol]

[symbol]

[symbol]

[symbol]

              570 580 590 600

[symbol]

[symbol]

[symbol]

[symbol]

              610 620 630 640

[symbol]

[symbol]

[symbol]

[symbol]

              650 660 670 680

[symbol]

[symbol]

[symbol]

[symbol]

              690 700 [symbol] [symbol]
SLTP
```

[0053] ADAR1 comprises the following sequence, wherein bold-underlined sequence reflects the dsRBD domains and the bold-underlined-italicized reflects the catalytic domain and the circled residue depicts a mutation site; ADAR1-p150 (SEQ ID NO:4):

```
                10 20 30 40
MNPRQGYSLS GYYTHPFQGY EHRQLRYQQP GPGSSPSSFL
                50 60 70 80
LKQIEFLKGQ LPEAPVIGKQ TPSLPPSLPG LRPRFPVLLA
                90 100 110 120
SSTRGRQVDI RGVPRGVHLR SQGLQRGFQH PSPRGRSLPQ
              130 140 150 160
RGVDCLSSHF QELSIYQDQE QRILKFLEEL GEGKATTAHD
              170 180 190 200
LSGKLGTPKK EINRVLYSLA KKGKLQKEAG TPPLWKIAVS
              210 220 230 240
TQAWNQHSGV VRPDGHSQGA PNSDPSLEPE DRNSTSVSED
              250 260 270 280
LLEPFIAVSA QAWNQHSGVV RPDSHSQGSP NSDPGLEPED
              290 300 310 320
SNSTSALEDP LEFLDMAEIK EKICDYLFNV SDSSALNLAK
              330 340 350 360
NIGLTKARDI NAVLIDMERQ GDVYRQGTTP PIWHLTDKKR
              370 380 390 400
ERMQIKRNTN SVPETAPAAI PETKRNAEFL TCNIPTSNAS
              410 420 430 440
NNMVTTEKVE NGQEPVIKLE NRQEARPEPA RLKPPVHYNG
              450 460 470 480
PSKAGYVDFE NGQWATDDIP DDLNSIRAAP GEFRAIMEMP
              490 500 510 520
SFYSHGLPRC SPYKKLTECQ LKNPISGLLE YAQFASQTCE
              530 540 550 560
FNMIEQSGPP HEPRFKFQVV INGREFPPAE AGSKKVAKQD
              570 580 590 600
AAMKAMTILL EEAKAKDSGK SEESSHYSTE KESEKTAESQ
              610 620 630 640
TPTPSATSFF SGKSPVTTLL ECMHKLGNSC EFRLLSKEGP
              650 660 670 680
AHEPKFQYCV AVGAQTFPSV SAPSKKVAKQ MAAEEAMKAL
              690 700 710 720
HGEATNSMAS DNQPEGMISE SLDNLESMMP NKVRKIGELV
              730 740 750 760
RYLNTNPVGG LLEYARSHGF AAEFKLVDQS GPPHEPKFVY
              770 780 790 800
QAKVGGRWFP AVCAHSKKQG KQEAADAALR VLIGENEKAE
              810 820 830 840
RMGFTEVTPV TGASLRRTML LLSRSPEAQP KTLPLTGSTF
              850 860 870 880
HDQIAMLSHR CFNTLTNSFQ PSLLGRKILA AIIMKKDSED
              890 900 910 920
MGVVV [symbol] [symbol] [symbol] [symbol]
              930 940 950 960

[symbol]

[symbol]

[symbol]

[symbol]

              970 980 990 1000

[symbol]

[symbol]

[symbol]

[symbol]

            1010 1020 1030 1040

[symbol]

[symbol]

[symbol]

[symbol]

            1050 1060 1070 1080

[symbol]

[symbol]

[symbol]

[symbol]

            1090 1100 1110 1120

[symbol]

[symbol]

[symbol]

[symbol]

            1130 1140 1150 1160

[symbol]

[symbol]

[symbol]

[symbol]

            1170 1180 1190 1200

[symbol]

[symbol]

[symbol]

[symbol]

            1210 1220 [symbol] [symbol] [symbol]
YLCPV
```

[0054] The forward and reverse RNA used to direct site-specific ADAR editing are known as “adRNA” and “radRNA,” respectively. adRNA comprises an RNA targeting domain, complementary to the target RNA and one or more ADAR recruiting domain. When bound to its target, the adRNA is able to recruit the ADAR enzyme to the target RNA. This ADAR enzyme is then able to catalyze the conversion of a target adenosine to inosine. In a split-ADAR system, an adRNA will comprise an RNA targeting domain flanked by a first RNA domain that recruits a first adapter or tether protein linked to a first ADAR catalytic domain and by a second RNA domain that recruits a second adapter or tether protein linked to a second ADAR catalytic domain. A structure of an adRNA useful for recruiting split-ADAR proteins comprises (first adapter or tether)-(optional linker)-(RNA targeting domain)-(optional linker)-(second adapter or tether), wherein the first and second adapter/tether are not the same. For example, FIG. 3D depicts a split ADAR comprising a TAR binding protein linked to a first ADAR2 domain and a Stem Loop binding protein linked to a second ADAR2 domain which is targeted using an adRNA comprising a TAR loop-targeting RNA-Histone Stem Loop.

[0055] An RNA targeting domain can be complementary to at least a portion of a target RNA. It can be complementary to at least a portion of that target RNA. The portion that can be complementary can be from about 50 basepairs (bp) to about 200 bp in length. The portion that can be complementary can be from about 20 bp to about 100 bp in length. The portion that can be complementary can be from about 10 bp to about 50 bp in length. The portion that can be complementary can be from about 50 bp to about 300 bp in length. The portion can be at least about 40 bp, 41 bp, 42 bp, 43 bp, 44 bp, 45 bp, 46 bp, 47 bp, 48 bp, 49 bp, 50 bp, 51 bp, 52 bp, 53 bp, 54 bp, 55 bp, 56 bp, 57 bp, 58 bp, 59 bp, 60 bp, 61 bp, 62 bp, 63 bp, 64 bp, 65 bp, 66 bp, 67 bp, 68 bp, 69 bp, 70 bp, 71 bp, 72 bp, 73 bp, 74 bp, 75 bp, 76 bp, 77 bp, 78 bp, 79 bp, 80 bp, 81 bp, 82 bp, 83 bp, 84 bp, 85 bp, 86 bp, 87 bp, 88 bp, 89 bp, 90 bp, 91 bp, 92 bp, 93 bp, 94 bp, 95 bp, 96 bp, 97 bp, 98 bp, 99 bp, 100 bp, 101 bp, 102 bp, 103 bp, 104 bp, 105 bp, 106 bp, 107 bp, 108 bp, 109 bp, 110 bp, 111 bp, 112 bp, 113 bp, 114 bp, 115 bp, 116 bp, 117 bp, 118 bp, 119 bp, 120 bp, 121 bp, 122 bp, 123 bp, 124 bp, 125 bp, 126 bp, 127 bp, 128 bp, 129 bp, 130 bp, 131 bp, 132 bp, 133 bp, 134 bp, 135 bp, 136 bp, 137 bp, 138 bp, 139 bp, 140 bp, 141 bp, 142 bp, 143 bp, 144 bp, 145 bp, 146 bp, 147 bp, 148 bp, 149 bp, or 150 bp. Modifying a length of the portion that is complementary can enhance efficiency of editing. In some cases, longer lengths of the portion can enhance efficiency of editing as compared to shorter lengths.

[0056] An RNA targeting domain when bound to a target RNA can produce a double stranded nucleic acid which is a substrate for the engineered polypeptides described herein. In some instances, the targeting domain comprises a mismatched nucleotide opposite an adenosine to be edited in the targeting domain when the targeting domain is bound to the target RNA to produce the double stranded substrate. In some embodiments, the mismatched nucleotide is a cytosine opposite the adenosine to be edited.

[0057] The position of the mismatched nucleotide in the RNA targeting domain can be varied across the length of the RNA targeting domain. In some cases, the mismatched nucleotide can be position at about 1 nt, 2 nt, 3 nt, 4 nt, 5 nt, 6 nt, 7 nt, 8 nt, 9 nt, 10 nt, 11 nt, 12 nt, 13 nt, 14 nt, 15 nt, 16 nt, 17 nt, 18 nt, 19 nt, 20 nt, 21 nt, 22 nt, 23 nt, 24 nt, 25 nt, 26 nt, 27 nt, 28 nt, 29 nt, 30 nt, 31 nt, 32 nt, 33 nt, 34 nt, 35 nt, 36 nt, 37 nt, 38 nt, 39 nt, 40 nt, 41 nt, 42 nt, 43 nt, 44 nt, 45 nt, 46 nt, 47 nt, 48 nt, 49 nt, 50 nt, 51 nt, 52 nt, 53 nt, 54 nt, 55 nt, 56 nt, 57 nt, 58 nt, 59 nt, 60 nt, 61 nt, 62 nt, 63 nt, 64 nt, 65 nt, 66 nt, 67 nt, 68 nt, 69 nt, 70 nt, 71 nt, 72 nt, 73 nt, 74 nt, 75 nt, 76 nt, 77 nt, 78 nt, 79 nt, 80 nt, 81 nt, 82 nt, 83 nt, 84 nt, 85 nt, 86 nt, 87 nt, 88 nt, 89 nt, 90 nt, 91 nt, 92 nt, 93 nt, 94 nt, 95 nt, 96 nt, 97 nt, 98 nt, 99 nt, 100 nt, 101 nt, 102 nt, 103 nt, 104 nt, 105 nt, 106 nt, 107 nt, 108 nt, 109 nt, 110 nt, 111 nt, 112 nt, 113 nt, 114 nt, 115 nt, 116 nt, 117 nt, 118 nt, 119 nt, 120 nt, 121 nt, 122 nt, 123 nt, 124 nt, 125 nt, 126 nt, 127 nt, 128 nt, 129 nt, 130 nt, 131 nt, 132 nt, 133 nt, 134 nt, 135 nt, 136 nt, 137 nt, 138 nt, 139 nt, 140 nt, 141 nt, 142 nt, 143 nt, 144 nt, 145 nt, 146 nt, 147 nt, 148 nt, 149 nt, or 150 nt from a 5′ end of the targeting domain.

[0058] The catalytic domains of ADAR2 are comprised in the sequences provided herein. Wildtype ADARs are naturally occurring RNA editing enzymes that catalyze the hydrolytic deamination of adenosine to inosine that is biochemically recognized as guanosine.

[0059] As used herein, the term “comprising” is intended to mean that the compositions and methods include the recited elements, but do not exclude others. Unless otherwise indicated, open terms for example “contain,” “containing,” “include,” “including,” and the like mean comprising. “Consisting essentially of” when used to define compositions and methods, shall mean excluding other elements of any essential significance to the combination for the intended use. Thus, a composition consisting essentially of the elements as defined herein may not exclude trace contaminants from the isolation and purification method and pharmaceutically acceptable carriers, such as phosphate buffered saline, preservatives, and the like. “Consisting of” shall mean excluding more than trace elements of other ingredients and substantial method steps for administering the compositions of this disclosure. Embodiments defined by each of these transition terms are within the scope of this disclosure.

[0060] “Canonical amino acids” refer to those 20 amino acids found naturally in the human body shown in the table below with each of their three letter abbreviations, one letter abbreviations, structures, and corresponding codons:

non-polar, aliphatic residues

| | | | | |
|---|---|---|---|---|
| Glycine | Gly | G | [chemical structure] | GGU GGC GGA GGG |
| Alanine | Ala | A | [chemical structure] | GCU GCC GCA GCG |
| Valine | Val | V | [chemical structure] | GUU GUC GUA GUG |
| Leucine | Leu | L | [chemical structure] | UUA UUG CUU CUC CUA CUG |
| Isoleucine | Ile | I | [chemical structure] | AUU AUC AUA |
| Proline | Pro | P | [chemical structure] | CCU CCC CCA CCG |

aromatic residues

| | | | | |
|---|---|---|---|---|
| Phenylalanine | Phe | F | [chemical structure] | UUU UUC |
| Tyrosine | Tyr | Y | [chemical structure] | UAU UAC |
| Tryptophan | Trp | W | [chemical structure] | UGG |

polar, non-charged residues

| | | | | |
|---|---|---|---|---|
| Serine | Ser | S | [chemical structure] | UCU UCC UCA UCG AGU AGC |
| Threonine | Thr | T | [chemical structure] | ACU ACC ACA ACG |
| Cysteine | Cys | C | [chemical structure] | UGU UGC |
| Methionine | Met | M | [chemical structure] | AUG |
| Asparagine | Asn | N | [chemical structure] | AAU AAC |
| Glutamine | Gln | Q | [chemical structure] | CAA CAG |

positively charged residues

| | | | | |
|---|---|---|---|---|
| Lysine | Lys | K | [chemical structure] | AAA AAG |
| Arginine | Arg | R | [chemical structure] | CGU CGC CGA CGG AGA AGG |
| Histidine | His | H | [chemical structure] | CAU CAC |

negatively charged residues

| | | | | |
|---|---|---|---|---|
| Aspartate | Asp | D | [chemical structure] | GAU GAC |
| Glutamate | Glu | E | [chemical structure] | GAA GAG |

[0061] As used herein, the term “Cas” refers to a protein of the CRISPR/Cas system or complex. The term “Cas9” can refer to a CRISPR associated endonuclease referred to by this name. Non-limiting exemplary Cas9s include Staphylococcus aureus Cas9, nuclease dead Cas9, and orthologs and biological equivalents each thereof. Orthologs include but are not limited to Streptococcus pyogenes Cas9 (“spCas9”), Cas9 from Streptococcus thermophiles, Legionella pneumophilia, Neisseria lactamica, Neisseria meningitides, Francisella novicida; and Cpf1 (which performs cutting functions analogous to Cas9) from various bacterial species including Acidaminococcus spp. and Francisella novicida U112. For example, UniProtKB G3ECR1 (CAS9_STRTR)) as well as dead Cas9 or dCas9, which lacks endonuclease activity (e.g., with mutations in both the RuvC and HNH domain) can be used. The term “Cas9” may further refer to equivalents of the referenced Cas9 having at least about 60%, 65%, 70%, 75%, 80%, 85%, 90%, 95%, or 99% identity thereto, including but not limited to other large Cas9 proteins. In some embodiments, the Cas9 is derived from Campylobacter jejuni or another Cas9 orthologs 1000 amino acids or less in length.

[0062] The term “Cas13” or “dCas13” includes the nuclease from the bacterium L. shahii. dCas13 is a catalytically-inactive Cas13 that can be used to direct ADARs to transcripts for editing.

[0063] “Conservative amino acid substitution” or, simply, “conservative variations” of a particular sequence refers to the replacement of one amino acid, or series of amino acids, with essentially identical amino acid sequences. One of skill will recognize that individual substitutions, deletions or additions which alter, add or delete a single amino acid or a percentage of amino acids in an encoded sequence result in “conservative variations” where the alterations result in the deletion of an amino acid, addition of an amino acid, or substitution of an amino acid with a chemically similar amino acid.

[0064] Conservative substitution tables include providing functionally similar amino acids. For example, one conservative substitution group includes Alanine (A), Serine (S), and Threonine (T). Another conservative substitution group includes Aspartic acid (D) and Glutamic acid (E). Another conservative substitution group includes Asparagine (N) and Glutamine (Q). Yet another conservative substitution group includes Arginine (R) and Lysine (K). Another conservative substitution group includes Isoleucine, (I) Leucine (L), Methionine (M), and Valine (V). Another conservative substitution group includes Phenylalanine (F), Tyrosine (Y), and Tryptophan (W).

[0065] As used herein, the term “CRISPR” can refer to a technique of sequence specific genetic manipulation relying on the clustered regularly interspaced short palindromic repeats pathway. CRISPR can be used to perform gene editing and/or gene regulation, as well as to simply target proteins to a specific genomic location.

[0066] “Gene editing” can refer to a type of genetic engineering in which the nucleotide sequence of a target polynucleotide is changed through introduction of deletions, insertions, single stranded or double stranded breaks, or base substitutions to the polynucleotide sequence. In some aspect, CRISPR-mediated gene editing utilizes the pathways of nonhomologous end-joining (NHEJ) or homologous recombination to perform the edits. ADAR proteins can also be considered as a type of gene editing by chemically changing nucleotides in RNA sequence thereby changing the encoded codon or stop signal. Gene regulation can refer to increasing or decreasing the production of specific gene products such as protein or RNA.

[0067] As used herein, the term “detectable marker” can refer to at least one marker capable of directly or indirectly, producing a detectable signal. A non-exhaustive list of such a marker includes enzymes which produce a detectable signal, for example by colorimetry, fluorescence, luminescence, such as horseradish peroxidase, alkaline phosphatase, β-galactosidase, glucose-6-phosphate dehydrogenase, chromophores such as fluorescent, luminescent dyes, groups with electron density detected by electron microscopy or by their electrical property such as conductivity, amperometry, voltammetry, impedance, detectable groups, for example whose molecules are of sufficient size to induce detectable modifications in their physical and/or chemical properties, such detection can be accomplished by optical methods such as diffraction, surface plasmon resonance, surface variation, the contact angle change or physical methods such as atomic force spectroscopy, tunnel effect, or radioactive molecules such as ³²P, ³⁵S or ¹²⁵I.

[0068] As used herein, the term “domain” can refer to a particular region of a protein or polypeptide and is associated with a particular function. For example, “a domain which associates with an RNA hairpin motif” can refer to the domain of a protein that binds one or more RNA hairpin. This binding can optionally be specific to a particular hairpin. A “catalytic domain” can refer to that particular section or amino acid subsequence found in a protein that catalyzes a particular activity (e.g., the enzymatic pocket) of protein.

[0069] The term “effective amount” can refer to a quantity sufficient to achieve a desired effect. In the context of therapeutic or prophylactic applications, the effective amount will depend on the type and severity of the condition at issue and the characteristics of the individual subject, such as general health, age, sex, body weight, and tolerance to pharmaceutical compositions. In the context of a gene editing system and effective amount is that amount of an enzyme (e.g., ADAR) to cause the desired editing of a genetic site in a target nucleic acid. The effective amount of editing can be measured by the level of mutation load in the subject and/or can be measured by a change in a disease marker associated with an unedited mutation.

[0070] The term “encode” as it is applied to polynucleotides can refer to a polynucleotide which is said to “encode” a polypeptide if, in its native state or when manipulated, it can be transcribed and/or translated to produce the mRNA for the polypeptide and/or a fragment thereof. The antisense strand is the complement of such a nucleic acid, and the encoding sequence can be deduced therefrom.

[0071] The terms “equivalent” or “biological equivalent” are used interchangeably when referring to a particular molecule, biological, or cellular material describes a material having minimal homology while still maintaining a desired structure or functionality. An equivalent in this context does not necessarily mean a 100% exact equivalent, but rather a material that has a measureable structure of function that does not differ by such extent as to be considered non-functional for an intended purpose. It is to be inferred without explicit recitation and unless otherwise intended, that when the disclosure relates to a polypeptide, protein, polynucleotide or antibody, an equivalent or a biologically equivalent of such is intended within the scope of this disclosure. Unless specifically recited herein, it is contemplated that any polynucleotide, polypeptide or protein mentioned herein also includes equivalents thereof. For example, an equivalent intends at least about 70% homology or identity, or at least 80% homology or identity and alternatively, or at least about 85%, or alternatively at least about 90%, or alternatively at least about 95%, or alternatively 98% percent homology or identity and exhibits substantially equivalent biological activity to the reference protein, polypeptide or nucleic acid. Alternatively, when referring to polynucleotides, an equivalent thereof is a polynucleotide that hybridizes under stringent conditions to the reference polynucleotide or its complement.

[0072] “Eukaryotic cells” comprise all of the life kingdoms except monera. They can be easily distinguished through a membrane-bound nucleus. Animals, plants, fungi, and protists are eukaryotes or organisms whose cells are organized into complex structures by internal membranes and a cytoskeleton. The most characteristic membrane-bound structure is the nucleus. Unless specifically recited, the term “host” includes a eukaryotic host, including, e.g., yeast, higher plant, insect and mammalian cells. Non-limiting examples of eukaryotic cells or hosts include simian, bovine, porcine, murine, rat, avian, reptilian and human.

[0073] As used herein, “expression” can refer to the process by which polynucleotides are transcribed into mRNA and/or the process by which the transcribed mRNA is subsequently being translated into peptides, polypeptides, or proteins. If the polynucleotide is derived from genomic DNA, expression can include splicing of the mRNA in a eukaryotic cell.

[0074] As used herein, the term “functional” can be used to modify any molecule, biological, or cellular material to intend that it accomplishes a particular, specified effect.

[0075] The terms “hairpin,” “hairpin loop,” “stem loop,” and/or “loop” used alone or in combination with “motif” is used in context of an oligonucleotide to refer to a structure formed in single stranded oligonucleotide when sequences within the single strand which are complementary when read in opposite directions base pair to form a region whose conformation resembles a hairpin or loop.

[0076] “Homology” or “identity” or “similarity” can refer to sequence similarity between two peptides or polypeptide or between two nucleic acid molecules. Homology can be determined by comparing a position in each sequence which can be aligned for purposes of comparison. When a position in the compared sequence is occupied by the same base or amino acid, then the molecules are homologous at that position. A degree of homology between sequences is a function of the number of matching or homologous positions shared by the sequences. An “unrelated” or “non-homologous” sequence shares less than 40% identity, or alternatively less than 25% identity, with one of the sequences of the disclosure.

[0077] Homology refers to a % identity of a sequence to a reference sequence. As a practical matter, any particular sequence can be at least 50%, 60%, 70%, 80%, 85%, 90%, 92%, 95%, 96%, 97%, 98% or 99% identical to any sequence described herein, which can correspond with a particular nucleic acid sequence described herein or a particular polypeptide sequence described herein. Percent identity can be determined conventionally using known computer programs such the Bestfit program (Wisconsin Sequence Analysis Package, Version 8 for Unix, Genetics Computer Group, University Research Park, 575 Science Drive, Madison, Wis. 53711). When using Bestfit or any other sequence alignment program to determine whether a particular sequence is, for instance, 95% identical to a reference sequence, the parameters can be set such that the percentage of identity is calculated over the full length of the reference sequence and that gaps in homology of up to 5% of the total reference sequence are allowed.

[0078] For example, in a specific embodiment the identity between a reference sequence (query sequence, i.e., a sequence of the disclosure) and a subject sequence, also referred to as a global sequence alignment, can be determined using the FASTDB computer program based on the algorithm of Brutlag et al. (Comp. App. Biosci. 6:237-245 (1990)). In some cases, parameters for a particular embodiment in which identity is narrowly construed, used in a FASTDB amino acid alignment, can include: Scoring Scheme=PAM (Percent Accepted Mutations) 0, k-tuple=2, Mismatch Penalty=1, Joining Penalty=20, Randomization Group Length=0, Cutoff Score=1, Window Size=sequence length, Gap Penalty=5, Gap Size Penalty=0.05, Window Size=500 or the length of the subject sequence, whichever is shorter. According to this embodiment, if the subject sequence is shorter than the query sequence due to N- or C-terminal deletions, not because of internal deletions, a manual correction can be made to the results to take into consideration the fact that the FASTDB program does not account for N- and C-terminal truncations of the subject sequence when calculating global percent identity. For subject sequences truncated at the N- and C-termini, relative to the query sequence, the percent identity can be corrected by calculating the number of residues of the query sequence that are lateral to the N- and C-terminal of the subject sequence, which are not matched/aligned with a corresponding subject residue, as a percent of the total bases of the query sequence. A determination of whether a residue is matched/aligned can be determined by results of the FASTDB sequence alignment. This percentage can be then subtracted from the percent identity, calculated by the FASTDB program using the specified parameters, to arrive at a final percent identity score. This final percent identity score can be used for the purposes of this embodiment. In some cases, only residues to the N- and C-termini of the subject sequence, which are not matched/aligned with the query sequence, are considered for the purposes of manually adjusting the percent identity score. That is, only query residue positions outside the farthest N- and C-terminal residues of the subject sequence are considered for this manual correction. For example, a 90 residue subject sequence can be aligned with a 100 residue query sequence to determine percent identity. The deletion occurs at the N-terminus of the subject sequence and therefore, the FASTDB alignment does not show a matching/alignment of the first 10 residues at the N-terminus. The 10 unpaired residues represent 10% of the sequence (number of residues at the N- and C-termini not matched/total number of residues in the query sequence) so 10% is subtracted from the percent identity score calculated by the FASTDB program. If the remaining 90 residues were perfectly matched the final percent identity can be 90%. In another example, a 90 residue subject sequence is compared with a 100 residue query sequence. This time the deletions are internal deletions so there are no residues at the N- or C-termini of the subject sequence which are not matched/aligned with the query. In this case the percent identity calculated by FASTDB is not manually corrected. Once again, only residue positions outside the N- and C-terminal ends of the subject sequence, as displayed in the FASTDB alignment, which are not matched/aligned with the query sequence are manually corrected for. The reference sequence can be obtained from a database such as the NCBI Reference Sequence Database (RefSeq) database. In certain cases, where a polypeptide comprises various function domains (e.g., dsRBD and catalytic domain as in ADAR), the percent identity can be with respect to a particular domain (e.g., the catalytic domain) while ignoring the sequence associated with the non-aligned domain.

[0079] “Hybridization” can refer to a reaction in which one or more polynucleotides react to form a complex that is stabilized via hydrogen bonding between the bases of the nucleotide residues. The hydrogen bonding can occur by Watson-Crick base pairing, Hoogstein binding, or in any other sequence-specific manner. The complex can comprise two strands forming a duplex structure, three or more strands forming a multi-stranded complex, a single self-hybridizing strand, or any combination of these. A hybridization reaction can constitute a step in a more extensive process, such as the initiation of a PC reaction, or the enzymatic cleavage of a polynucleotide by a ribozyme.

[0080] Examples of stringent hybridization conditions include: incubation temperatures of about 25° C. to about 37° C.; hybridization buffer concentrations of about 6×SSC to about 10×SSC; formamide concentrations of about 0% to about 25%; and wash solutions from about 4×SSC to about 8×SSC. Examples of moderate hybridization conditions include: incubation temperatures of about 40° C. to about 50° C.; buffer concentrations of about 9×SSC to about 2×SSC; formamide concentrations of about 30% to about 50%; and wash solutions of about 5×SSC to about 2×SSC. Examples of high stringency conditions include: incubation temperatures of about 55° C. to about 68° C.; buffer concentrations of about 1×SSC to about 0.1×SSC; formamide concentrations of about 55% to about 75%; and wash solutions of about 1×SSC, 0.1×SSC, or deionized water. In general, hybridization incubation times are from 5 minutes to 24 hours, with 1, 2, or more washing steps, and wash incubation times are about 1, 2, or 15 minutes. SSC is 0.15 M NaCl and 15 mM citrate buffer. It is understood that equivalents of SSC using other buffer systems can be employed.

[0081] The term “isolated” as used herein can refer to molecules or biologicals or cellular materials being substantially free from other materials. In one aspect, the term “isolated” can refer to nucleic acid, such as DNA or RNA, or protein or polypeptide (e.g., an antibody or derivative thereof), or cell or cellular organelle, or tissue or organ, separated from other DNAs or RNAs, or proteins or polypeptides, or cells or cellular organelles, or tissues or organs, respectively, that are present in the natural source. The term “isolated” also can refer to a nucleic acid or peptide that is substantially free of cellular material, viral material, or culture medium when produced by recombinant DNA techniques, or chemical precursors or other chemicals when chemically synthesized. Moreover, an “isolated nucleic acid” is meant to include nucleic acid fragments which are not naturally occurring as fragments and may not be found in the natural state. The term “isolated” is also used herein to refer to polypeptides which are isolated from other cellular proteins and is meant to encompass both purified and recombinant polypeptides. The term “isolated” is also used herein to refer to cells or tissues that are isolated from other cells or tissues and is meant to encompass both cultured and engineered cells or tissues.

[0082] “LambdaN” or “λN” refers to the N protein from lambdoid phages. The N protein can have a sequence a sequence selected from the group consisting of SEQ ID NO:16, 18, 20 and 22. The N protein binds to the nutL BoxB sequence or the nutR BoxB sequence. The nutL BoxB sequence comprises GCCCUGAAGAAGGGC (SEQ ID NO:23), while the nutR BoxB sequence comprises GCCCUGAAAAAGGGC (SEQ ID NO:24).

[0083] The term “lentivirus” as used herein refers to a member of the class of viruses associated with this name and belonging to the genus lentivirus, family Retroviridae. While some lentiviruses are known to cause diseases, other lentivirus are known to be suitable for gene delivery. See, e.g., Tomás et al. (2013) Biochemistry, Genetics and Molecular Biology: “Gene Therapy—Tools and Potential Applications,” ISBN 978-953-51-1014-9.

[0084] “MS2” or “MS2 coat protein” refers to the coat protein from RNA bacteriophages. The MS2 coat protein is a small 129 amino acid, 14 kDa protein that binds to small RNA hairpins. The MS2 coat protein has the sequence of SEQ ID NO:4 and can bind to RNA hairpin sequences having the sequence ACAUGAGGAUUACCCAUG (SEQ ID NO:13) or ACAUGAGGAUCACCCAUG (SEQ ID NO:14). The difference between SEQ ID NO:13 and 14 is a single U to C substitution in the loop that increases the binding affinity by 50-fold over SEQ ID NO:13.

[0085] “Messenger RNA” or “mRNA” is a nucleic acid molecule that is transcribed from DNA and then processed to remove non-coding sections known as introns. The resulting mRNA is exported from the nucleus (or another locus where the DNA is present) and translated into a protein. The term “pre-mRNA” can refer to the strand prior to processing to remove non-coding sections.

[0086] The term “mutation” as used herein, can refer to an alteration to a nucleic acid sequence encoding a protein relative to the consensus sequence of said protein by any process or mechanism. This includes any mutation in which a protein, enzyme, polynucleotide, or gene sequence is altered, and any detectable change in a cell arising from such a mutation. Typically, a mutation occurs in a polynucleotide or gene sequence, by point mutations, deletions, or insertions of single or multiple nucleotide residues. “Missense” mutations result in the substitution of one codon for another; “nonsense” mutations change a codon from one encoding a particular amino acid to a stop codon. Nonsense mutations often result in truncated translation of proteins. “Silent” mutations are those which have no effect on the resulting protein. As used herein the term “point mutation” can refer to a mutation affecting only one nucleotide in a gene sequence. “Splice site mutations” are those mutations present pre-mRNA (prior to processing to remove introns) resulting in mistranslation and often truncation of proteins from incorrect delineation of the splice site. A mutation can comprise a single nucleotide variation (SNV). A mutation can comprise a sequence variant, a sequence variation, a sequence alteration, or an allelic variant. The reference DNA sequence can be obtained from a reference database. A mutation can affect function. A mutation may not affect function. A mutation can occur at the DNA level in one or more nucleotides, at the ribonucleic acid (RNA) level in one or more nucleotides, at the protein level in one or more amino acids, or any combination thereof. Specific changes that can constitute a mutation can include a substitution, a deletion, an insertion, an inversion, or a conversion in one or more nucleotides or one or more amino acids. A mutation can be a point mutation. A mutation can be a fusion gene. A fusion pair or a fusion gene can result from a mutation, such as a translocation, an interstitial deletion, a chromosomal inversion, or any combination thereof. A mutation can constitute variability in the number of repeated sequences, such as triplications, quadruplications, or others. For example, a mutation can be an increase or a decrease in a copy number associated with a given sequence (copy number variation, or CNV). A mutation can include two or more sequence changes in different alleles or two or more sequence changes in one allele. A mutation can include two different nucleotides at one position in one allele, such as a mosaic. A mutation can include two different nucleotides at one position in one allele, such as a chimeric. A mutation can be present in a malignant tissue. A presence or an absence of a mutation can indicate an increased risk to develop a disease or condition. A presence or an absence of a mutation can indicate a presence of a disease or condition. A mutation can be present in a benign tissue. Absence of a mutation can indicate that a tissue or sample is benign. As an alternative, absence of a mutation may not indicate that a tissue or sample is benign. Methods as described herein can comprise identifying a presence of a mutation in a sample.

[0087] A “mutant”, “variant” or “modified” protein, enzyme, polynucleotide, gene, or cell, means a protein, enzyme, polynucleotide, gene, or cell, that has been altered or derived, or is in some way different or changed, from a parent protein or wild-type protein, enzyme, polynucleotide, gene, or cell. A mutant or modified protein or enzyme is usually, although not necessarily, expressed from a mutant polynucleotide or gene. The variant or mutant polypeptide can result from a point mutation or deletion. In some instances, a mutant or variant protein is engineered by mutating one or more nucleotides in a codon of a polynucleotide encoding a protein or polypeptide. A mutant protein or polypeptide can comprise a plurality of mutations compared to a wild-type or parental protein or polypeptide. For example, a mutant protein or polypeptide can comprise 1, 2, 3, 4, 5, 10, 15, 20 or 30 or more mutations relative to a parental or wild-type protein or polypeptide.

[0088] The term “non-canonical amino acids” can refer to those synthetic or otherwise modified amino acids that fall outside this group, typically generated by chemical synthesis or modification of canonical amino acids (e.g. amino acid analogs). The disclosure employs proteinogenic non-canonical amino acids in some of the methods and vectors disclosed herein. A non-limiting exemplary non-canonical amino acid is pyrrolysine (Pyl or O), the chemical structure of which is provided below:

[chemical structure]

[0089] Inosine (I) is another exemplary non-canonical amino acid, which can be found in tRNA and is essential for proper translation according to “wobble base pairing.” The structure of inosine is provided above.

[0090] Non-limiting examples of a modified amino acid include a glycosylated amino acid, a sulfated amino acid, a prenlyated (e.g., farnesylated, geranylgeranylated) amino acid, an acetylated amino acid, an acylated amino acid, a pegylated amino acid, a biotinylated amino acid, a carboxylated amino acid, a phosphorylated amino acid, and the like. References adequate to guide one of skill in the modification of amino acids are replete throughout the literature. Example protocols are found in Walker (1998) Protein Protocols on CD-ROM (Humana Press, Towata, N.J.).

[0091] A “parent” protein, enzyme, polynucleotide, gene, or cell, is any protein, enzyme, polynucleotide, gene, or cell, from which any other protein, enzyme, polynucleotide, gene, or cell, is derived or made, using any methods, tools or techniques, and whether or not the parent is itself native or mutant. A parent polynucleotide or gene encodes for a parent protein or enzyme.

[0092] The term “protein”, “peptide” and “polypeptide” are used interchangeably and in their broadest sense to refer to a compound of two or more subunit amino acids, amino acid analogs or peptidomimetics. The subunits can be linked by peptide bonds. In another embodiment, the subunit can be linked by other bonds, e.g., ester, ether, etc. A protein or peptide can contain at least two amino acids and no limitation is placed on the maximum number of amino acids which can comprise a protein's or peptide's sequence. As used herein the term “amino acid” can refer to either natural and/or unnatural or synthetic amino acids, including glycine and both the D and L optical isomers, amino acid analogs and peptidomimetics. As used herein, the term “fusion protein” can refer to a protein comprised of domains from more than one naturally occurring or recombinantly produced protein, where generally each domain serves a different function. In this regard, the term “linker” can refer to a polypeptide fragment that is used to link these domains together—optionally to preserve the conformation of the fused protein domains and/or prevent unfavorable interactions between the fused protein domains which can compromise their respective functions.

[0093] The terms “polynucleotide” and “oligonucleotide” are used interchangeably and refer to a polymeric form of nucleotides of any length, either deoxyribonucleotides or ribonucleotides or analogs thereof. Polynucleotides can have any three-dimensional structure and can perform any function, known or unknown. The following are non-limiting examples of polynucleotides: a gene or gene fragment (for example, a probe, primer, EST or SAGE tag), exons, introns, messenger RNA (mRNA), transfer RNA, ribosomal RNA, RNAi, ribozymes, cDNA, recombinant polynucleotides, branched polynucleotides, plasmids, vectors, isolated DNA of any sequence, isolated RNA of any sequence, nucleic acid probes and primers. A polynucleotide can comprise modified nucleotides, such as methylated nucleotides and nucleotide analogs. If present, modifications to the nucleotide structure can be imparted before or after assembly of the polynucleotide. The sequence of nucleotides can be interrupted by non-nucleotide components. A polynucleotide can be further modified after polymerization, such as by conjugation with a labeling component. The term also can refer to both double- and single-stranded molecules. Unless otherwise specified or required, any embodiment of this disclosure that is a polynucleotide encompasses both the double-stranded form and each of two complementary single-stranded forms known or predicted to make up the double-stranded form.

[0094] A polynucleotide is composed of a specific sequence of four nucleotide bases: adenine (A); cytosine (C); guanine (G); thymine (T); and uracil (U) for thymine when the polynucleotide is RNA. In some embodiments, the polynucleotide can comprise one or more other nucleotide bases, such as inosine (I), a nucleoside formed when hypoxanthine is attached to ribofuranose via a β-N9-glycosidic bond, resulting in the chemical structure:

[chemical structure]

[0095] Inosine is read by the translation machinery as guanine (G).

[0096] The term “polynucleotide sequence” is the alphabetical representation of a polynucleotide molecule. This alphabetical representation can be input into databases in a computer having a central processing unit and used for bioinformatics applications such as functional genomics and homology searching.

[0097] A polynucleotide sequence can be derived from a known polypeptide sequence using well-known codon tables. An amino acid in a polypeptide can be encoded by more than one codon due to the degeneracy of the genetic code. A polynucleotide sequence can be deduced from a polypeptide sequence using various computer algorithms or by hand using a codon table. Moreover, because of the degeneracy of the genetic code, optimized codon (e.g., codon-bias for various organisms) can be used when expression of a deduced polynucleotide is to be used in an organism that does not normally produce the particular polypeptide.

[0098] As used herein, “PP7” refers to coat protein of the single stranded RNA bacteriophage of P. aeruginosa. The PP7 coat protein (SEQ ID NO:25) binds to a hairpin RNA having the sequence UAAGGAGUUUAUAUGGAAACCCUUA (SEQ ID NO:26). RNA recognitions sites and mutagenesis of PP7 are described in Lim et al., Nucleic Acids Res., 30(19):4138-4144, 2002, which is incorporated herein by reference.

[0099] A “PUF domain” or “Pumillio Domain” or “Pumby Sequence” refer to RNA-binding protein Pumilio that can be concatenated into chains of varying composition and length to target different bases in a nucleotide sequence. When bound into a chain, each module has a preferred affinity for a specific RNA base (see also, U.S. Pat. Publ. No. US20160238593A1 which is incorporated herein by reference in its entirety). The following Table 1 provides sequences that contain cloning overhangs used to assemble hexamers for Pumby:

TABLE 1
module1 - hex1 A
GTCATGCGTCTCCAGGTCGATAGTAGCGGTCTCCCGAGGCGAACTTCACCAGCAC
ACTGAACAACTCGTGCAAGACCAGTATGGGTGCTATGTCATCCAACATGTCCTTG
AGCACGGACGCCC CGAAGACAAGTCAAAGATCGTGGCTGGAGACGGAGTGT
module1 - hex1 C
GTCATGCGTCTCCAGGTCGATAGTAGCGGTCTCCCGAGGCGAACTTCACCAGCAC
ACTGAACAACTCGTGCAAGACCAGTATGGGTCCTATGTCATCCGGCATGTCCTTG
AGCACGGACGCCC CGAAGACAAGTCAAAGATCGTGGCTGGAGACGGAGTGT
module1- hex1 G
GTCATGCGTCTCCAGGTCGATAGTAGCGGTCTCCCGAGGCGAACTTCACCAGCAC
ACTGAACAACTCGTGCAAGACCAGTATGGGTCCTATGTCATCGAACATGTCCTTG
AGCACGGACGCCC CGAAGACAAGTCAAAGATCGTGGCTGGAGACGGAGTGT
module1 - hex1 U
GTCATGCGTCTCCAGGTCGATAGTAGCGGTCTCCCGAGGCGAACTTCACCAGCAC
ACTGAACAACTCGTGCAAGACCAGTATGGGAACTATGTCATCCAACATGTCCTTG
AGCACGGACGCC CCGAAGACAAGTCAAAGATCGTGGCTGGAGACGGAGTGT
module1 - hex2 A
GTCATGCGTCTCCAGGTCGATAGTAGCGGTCTCCGAACTTCACCAGCACACTGAA
CAACTCGTGCAAGACCAGTATGGGTGCTATGTCATCCAACATGTCCTTGAGCACG
GACGCCCCGAAGA CAAGTCAAAGATCGTGGCTGGAGACGGAGTGT
module1 - hex2 C
GTCATGCGTCTCCAGGTCGATAGTAGCGGTCTCCGAACTTCACCAGCACACTGAA
CAACTCGTGCAAGACCAGTATGGGTCCTATGTCATCCGGCATGTCCTTGAGCACG
GACGCCCCGAAGA CAAGTCAAAGATCGTGGCTGGAGACGGAGTGT
module1- hex2 G
GTCATGCGTCTCCAGGTCGATAGTAGCGGTCTCCGAACTTCACCAGCACACTGAA
CAACTCGTGCAAGACCAGTATGGGTCCTATGTCATCGAACATGTCCTTGAGCACG
GACGCCCCGAAGA CAAGTCAAAGATCGTGGCTGGAGACGGAGTGT
module1 - hex2 U
GTCATGCGTCTCCAGGTCGATAGTAGCGGTCTCCGAACTTCACCAGCACACTGAA
CAACTCGTGCAAGACCAGTATGGGAACTATGTCATCCAACATGTCCTTGAGCACG
GACGCCCCGAAGA CAAGTCAAAGATCGTGGCTGGAGACGGAGTGT
module1- hex3 A
GTCATGCGTCTCCAGGTCGATAGTAGCGGTCTCCGGCTGAACTTCACCAGCACAC
TGAACAACTCGTGCAAGACCAGTATGGGTGCTATGTCATCCAACATGTCCTTGAG
CACGGACGCCCCGA AGACAAGTCAAAGATCGTGGCTGGAGACGGAGTGT
module1 - hex3 C
GTCATGCGTCTCCAGGTCGATAGTAGCGGTCTCCGGCTGAACTTCACCAGCACAC
TGAACAACTCGTGCAAGACCAGTATGGGTCCTATGTCATCCGGCATGTCCTTGAG
CACGGACGCCCCGA AGACAAGTCAAAGATCGTGGCTGGAGACGGAGTGT
module1 - hex3 G
GTCATGCGTCTCCAGGTCGATAGTAGCGGTCTCCGGCTGAACTTCACCAGCACAC
TGAACAACTCGTGCAAGACCAGTATGGGTCCTATGTCATCGAACATGTCCTTGAG
CACGGACGCCCCGA AGACAAGTCAAAGATCGTGGCTGGAGACGGAGTGT
module1 - hex3 U
GTCATGCGTCTCCAGGTCGATAGTAGCGGTCTCCGGCTGAACTTCACCAGCACAC
TGAACAACTCGTGCAAGACCAGTATGGGAACTATGTCATCCAACATGTCCTTGAG
CACGGACGCCCCG AAGACAAGTCAAAGATCGTGGCTGGAGACGGAGTGT
module1- hex4 A
GTCATGCGTCTCCAGGTCGATAGTAGCGGTCTCCCTGAACTTCACCAGCACACTG
AACAACTCGTGCAAGACCAGTATGGGTGCTATGTCATCCAACATGTCCTTGAGCA
CGGACGCCCCGAA GACAAGTCAAAGATCGTGGCTGGAGACGGAGTGT
module1 - hex4 C
GTCATGCGTCTCCAGGTCGATAGTAGCGGTCTCCCTGAACTTCACCAGCACACTG
AACAACTCGTGCAAGACCAGTATGGGTCCTATGTCATCCGGCATGTCCTTGAGCA
CGGACGCCCCGAA GACAAGTCAAAGATCGTGGCTGGAGACGGAGTGT
module1 - hex4 G
GTCATGCGTCTCCAGGTCGATAGTAGCGGTCTCCCTGAACTTCACCAGCACACTG
AACAACTCGTGCAAGACCAGTATGGGTCCTATGTCATCGAACATGTCCTTGAGCA
CGGACGCCCCGAA GACAAGTCAAAGATCGTGGCTGGAGACGGAGTGT
module1 - hex4 U
GTCATGCGTCTCCAGGTCGATAGTAGCGGTCTCCCTGAACTTCACCAGCACACTG
AACAACTCGTGCAAGACCAGTATGGGAACTATGTCATCCAACATGTCCTTGAGCA
CGGACGCCCCGAA GACAAGTCAAAGATCGTGGCTGGAGACGGAGTGT
module2 A
GTCATGCGTCTCCGGCTGAACTTCACCAGCACACTGAACAACTCGTGCAAGACCA
GTATGGGTGCTATGTCATCCAACATGTCCTTGAGCACGGACGCCCCGAAGACAAG
TCAAAGATCGTG GCTGAGGAGACGGAGTGT
module2 C
GTCATGCGTCTCCGGCTGAACTTCACCAGCACACTGAACAACTCGTGCAAGACCA
GTATGGGTCCTATGTCATCCGGCATGTCCTTGAGCACGGACGCCCCGAAGACAAG
TCAAAGATCGTG GCTGAGGAGACGGAGTGT
module2 G
GTCATGCGTCTCCGGCTGAACTTCACCAGCACACTGAACAACTCGTGCAAGACCA
GTATGGGTCCTATGTCATCGAACATGTCCTTGAGCACGGACGCCCCGAAGACAAG
TCAAAGATCGTG GCTGAGGAGACGGAGTGT
module2 U
GTCATGCGTCTCCGGCTGAACTTCACCAGCACACTGAACAACTCGTGCAAGACCA
GTATGGGAACTATGTCATCCAACATGTCCTTGAGCACGGACGCCCCGAAGACAAG
TCAAAGATCGTG GCTGAGGAGACGGAGTGT
module3 A
GTCATGCGTCTCCCTGAACTTCACCAGCACACTGAACAACTCGTGCAAGACCAGT
ATGGGTGCTATGTCATCCAACATGTCCTTGAGCACGGACGCCCCGAAGACAAGTC
AAAGATCGTGGCT GAACGGAGACGGAGTGT
module3 C
GTCATGCGTCTCCCTGAACTTCACCAGCACACTGAACAACTCGTGCAAGACCAGT
ATGGGTCCTATGTCATCCGGCATGTCCTTGAGCACGGACGCCCCGAAGACAAGTC
AAAGATCGTGGCT GAACGGAGACGGAGTGT
module3 G
GTCATGCGTCTCCCTGAACTTCACCAGCACACTGAACAACTCGTGCAAGACCAGT
ATGGGTCCTATGTCATCGAACATGTCCTTGAGCACGGACGCCCCGAAGACAAGTC
AAAGATCGTGGCT GAACGGAGACGGAGTGT
module3 U
GTCATGCGTCTCCCTGAACTTCACCAGCACACTGAACAACTCGTGCAAGACCAGT
ATGGGAACTATGTCATCCAACATGTCCTTGAGCACGGACGCCCCGAAGACAAGTC
AAAGATCGTGGC TGAACGGAGACGGAGTGT
module4 A
GTCATGCGTCTCCGAACTTCACCAGCACACTGAACAACTCGTGCAAGACCAGTAT
GGGTGCTATGTCATCCAACATGTCCTTGAGCACGGACGCCCCGAAGACAAGTCAA
AGATCGTGGGAGA CGGAGTGT
module4 C
GTCATGCGTCTCCGAACTTCACCAGCACACTGAACAACTCGTGCAAGACCAGTAT
GGGTCCTATGTCATCCGGCATGTCCTTGAGCACGGACGCCCCGAAGACAAGTCAA
AGATCGTGGGAGA CGGAGTGT
module4 G
GTCATGCGTCTCCGAACTTCACCAGCACACTGAACAACTCGTGCAAGACCAGTAT
GGGTCCTATGTCATCGAACATGTCCTTGAGCACGGACGCCCCGAAGACAAGTCAA
AGATCGTGGGAGA CGGAGTGT
module4 U
GTCATGCGTCTCCGAACTTCACCAGCACACTGAACAACTCGTGCAAGACCAGTAT
GGGAACTATGTCATCCAACATGTCCTTGAGCACGGACGCCCCGAAGACAAGTCAA
AGATCGTGGGAG ACGGAGTGT
module5 A
GTCATGCGTCTCCCGTGGCTGAACTTCACCAGCACACTGAACAACTCGTGCAAGA
CCAGTATGGGTGCTATGTCATCCAACATGTCCTTGAGCACGGACGCCCCGAAGAC
AAGTCAAAGATCG TGGCGGAGACGGAGTGT
module5 C
GTCATGCGTCTCCCGTGGCTGAACTTCACCAGCACACTGAACAACTCGTGCAAGA
CCAGTATGGGTCCTATGTCATCCGGCATGTCCTTGAGCACGGACGCCCCGAAGAC
AAGTCAAAGATCG TGGCGGAGACGGAGTGT
module5 G
GTCATGCGTCTCCCGTGGCTGAACTTCACCAGCACACTGAACAACTCGTGCAAGA
CCAGTATGGGTCCTATGTCATCGAACATGTCCTTGAGCACGGACGCCCCGAAGAC
AAGTCAAAGATCG TGGCGGAGACGGAGTGT
module5 U
GTCATGCGTCTCCCGTGGCTGAACTTCACCAGCACACTGAACAACTCGTGCAAGA
CCAGTATGGGAACTATGTCATCCAACATGTCCTTGAGCACGGACGCCCCGAAGAC
AAGTCAAAGATCG TGGCGGAGACGGAGTGT
module6- hex1 A
GTCATGCGTCTCCTGGCTGAACTTCACCAGCACACTGAACAACTCGTGCAAGACC
AGTATGGGTGCTATGTCATCCAACATGTCCTTGAGCACGGACGCCCCGAAGACAA
GTCAAAGATCGTGGCTGAACAGAGACCGGATGGCAGAAGGTGGAGACGGAGTGT
module6- hex1 C
GTCATGCGTCTCCTGGCTGAACTTCACCAGCACACTGAACAACTCGTGCAAGACC
AGTATGGGTCCTATGTCATCCGGCATGTCCTTGAGCACGGACGCCCCGAAGACAA
GTCAAAGATCGTGGCTGAACAGAGACCGGATGGCAGAAGGTGGAGACGGAGTGT
module6- hex1 G
GTCATGCGTCTCCTGGCTGAACTTCACCAGCACACTGAACAACTCGTGCAAGACC
AGTATGGGTCCTATGTCATCGAACATGTCCTTGAGCACGGACGCCCCGAAGACAA
GTCAAAGATCGTGGCTGAACAGAGACCGGATGGCAGAAGGTGGAGACGGAGTGT
module6- hex1 U
GTCATGCGTCTCCTGGCTGAACTTCACCAGCACACTGAACAACTCGTGCAAGACC
AGTATGGGAACTATGTCATCCAACATGTCCTTGAGCACGGACGCCCCGAAGACAA
GTCAAAGATCGTGGCTGAACAGAGACCGGATGGCAGAAGGTGGAGACGGAGTGT
module6- hex2 A
GTCATGCGTCTCCTGGCTGAACTTCACCAGCACACTGAACAACTCGTGCAAGACC
AGTATGGGTGCTATGTCATCCAACATGTCCTTGAGCACGGACGCCCCGAAGACAA
GTCAAAGATCGTG GCTAGAGACCGGATGGCAGAAGGTGGAGACGGAGTGT
module6- hex2 C
GTCATGCGTCTCCTGGCTGAACTTCACCAGCACACTGAACAACTCGTGCAAGACC
AGTATGGGTCCTATGTCATCCGGCATGTCCTTGAGCACGGACGCCCCGAAGACAA
GTCAAAGATCGTG GCTAGAGACCGGATGGCAGAAGGTGGAGACGGAGTGT
module6- hex2 G
GTCATGCGTCTCCTGGCTGAACTTCACCAGCACACTGAACAACTCGTGCAAGACC
AGTATGGGTCCTATGTCATCGAACATGTCCTTGAGCACGGACGCCCCGAAGACAA
GTCAAAGATCGTG GCTAGAGACCGGATGGCAGAAGGTGGAGACGGAGTGT
module6- hex2 U
GTCATGCGTCTCCTGGCTGAACTTCACCAGCACACTGAACAACTCGTGCAAGACC
AGTATGGGAACTATGTCATCCAACATGTCCTTGAGCACGGACGCCCCGAAGACAA
GTCAAAGATCGTG GCTAGAGACCGGATGGCAGAAGGTGGAGACGGAGTGT
module6- hex3 A
GTCATGCGTCTCCTGGCTGAACTTCACCAGCACACTGAACAACTCGTGCAAGACC
AGTATGGGTGCTATGTCATCCAACATGTCCTTGAGCACGGACGCCCCGAAGACAA
GTCAAAGATCGTG GCTGAAGAGACCGGATGGCAGAAGGTGGAGACGGAGTGT
module6- hex3 C
GTCATGCGTCTCCTGGCTGAACTTCACCAGCACACTGAACAACTCGTGCAAGACC
AGTATGGGTCCTATGTCATCCGGCATGTCCTTGAGCACGGACGCCCCGAAGACAA
GTCAAAGATCGTG GCTGAAGAGACCGGATGGCAGAAGGTGGAGACGGAGTGT
module6- hex3 G
GTCATGCGTCTCCTGGCTGAACTTCACCAGCACACTGAACAACTCGTGCAAGACC
AGTATGGGTCCTATGTCATCGAACATGTCCTTGAGCACGGACGCCCCGAAGACAA
GTCAAAGATCGTG GCTGAAGAGACCGGATGGCAGAAGGTGGAGACGGAGTGT
module6- hex3 U
GTCATGCGTCTCCTGGCTGAACTTCACCAGCACACTGAACAACTCGTGCAAGACC
AGTATGGGAACTATGTCATCCAACATGTCCTTGAGCACGGACGCCCCGAAGACAA
GTCAAAGATCGTG GCTGAAGAGACCGGATGGCAGAAGGTGGAGACGGAGTGT
module6- hex4 A
GTCATGCGTCTCCTGGCTGAACTTCACCAGCACACTGAACAACTCGTGCAAGACC
AGTATGGGTGCTATGTCATCCAACATGTCCTTGAGCACGGACGCCCCGAAGACAA
GTCAAAGATCGTGGCTGGACGCAGAGACCGGATGGCAGAAGGTGGAGACGGAGT
GT
module6- hex4 C
GTCATGCGTCTCCTGGCTGAACTTCACCAGCACACTGAACAACTCGTGCAAGACC
AGTATGGGTCCTATGTCATCCGGCATGTCCTTGAGCACGGACGCCCCGAAGACAA
GTCAAAGATCGTGGCTGGACGCAGAGACCGGATGGCAGAAGGTGGAGACGGAGT
GT
module6- hex4 G
GTCATGCGTCTCCTGGCTGAACTTCACCAGCACACTGAACAACTCGTGCAAGACC
AGTATGGGTCCTATGTCATCGAACATGTCCTTGAGCACGGACGCCCCGAAGACAA
GTCAAAGATCGTGGCTGGACGCAGAGACCGGATGGCAGAAGGTGGAGACGGAGT
GT
module6- hex4 U
GTCATGCGTCTCCTGGCTGAACTTCACCAGCACACTGAACAACTCGTGCAAGACC
AGTATGGGAACTATGTCATCCAACATGTCCTTGAGCACGGACGCCCCGAAGACAA
GTCAAAGATCGTGGCTGGACGCAGAGACCGGATGGCAGAAGGTGGAGACGGAGT
GT

[0100] As used herein, the term “purification marker” can refer to at least one marker useful for purification or identification. A non-exhaustive list of this marker includes poly-His, lacZ, GST, maltose-binding protein, NusA, BCCP, c-myc, CaM, FLAG, GFP, YFP, cherry, thioredoxin, poly (NANP), V5, Snap, HA, chitin-binding protein, Softag 1, Softag 3, Strep, or S-protein. Suitable direct or indirect fluorescence marker comprise FLAG, GFP, YFP, RFP, dTomato, cherry, Cy3, Cy 5, Cy 5.5, Cy 7, DNP, AMCA, Biotin, Digoxigenin, Tamra, Texas Red, rhodamine, Alexa fluors, FITC, TRITC or any other fluorescent dye or hapten.

[0101] As used herein, the term “recombinant expression system” refers to a genetic construct or constructs for the expression of certain genetic material formed by recombination; the term “construct” in this regard is interchangeable with the term “vector” as defined herein. A recombinant expression system can include one or more constructs such as, for example, an expression system wherein a first domain of a polypeptide is encoded by a first construct and a second domain of the polypeptide is encoded by a second construct such that when both domains are expressed and located to a desired site a function protein is produced. One approach as described herein includes restricting catalytic activity of an ADAR of the disclosure by a split reassembly approach. In such a design, a first domain (such as a recruiting domain) can be catalytically inactive by itself and a second domain can be catalytically inactive by itself but when brought together in a reassembly the two domains together provide catalytic activity. A nucleic acid comprising two domains can be split at any number of locations, such as a location between the two domains. In some cases, a first domain or second domain can be operably linked to an MS2 stem loop, a BoxB stem-loop, a U1A stem-loop, a modified version of any of these, or any combination thereof.

[0102] As used herein, the term “recombinant protein” can refer to a polypeptide which is produced by recombinant DNA techniques, wherein generally, DNA encoding the polypeptide is inserted into a suitable expression vector which is in turn used to transform a host cell to produce the heterologous protein (recombinant protein). The recombinant protein can be a wild-type protein wherein the coding sequence for the protein has been cloned and expressed in an organism that normally does not express the protein or under the control of a non-natural promoter. The recombinant protein can be a mutant protein that has been mutated to have a biological activity that is different and/or improved from the parental or wild-type protein.

[0103] The term “sample” as used herein, generally refers to any sample of a subject (such as a blood sample or a tissue sample). A sample or portion thereof can comprise a stem cell. A portion of a sample can be enriched for the stem cell. The stem cell can be isolated from the sample. A sample can comprise a tissue, a cell, serum, plasma, exosomes, a bodily fluid, or any combination thereof. A bodily fluid can comprise urine, blood, serum, plasma, saliva, mucus, spinal fluid, tears, semen, bile, amniotic fluid, or any combination thereof. A sample or portion thereof can comprise an extracellular fluid obtained from a subject. A sample or portion thereof can comprise cell-free nucleic acid, DNA or RNA. A sample or portion thereof can be analyzed for a presence or absence or one or more mutations. Genomic data can be obtained from the sample or portion thereof. A sample can be a sample suspected or confirmed of having a disease or condition. A sample can be a sample removed from a subject via a non-invasive technique, a minimally invasive technique, or an invasive technique. A sample or portion thereof can be obtained by a tissue brushing, a swabbing, a tissue biopsy, an excised tissue, a fine needle aspirate, a tissue washing, a cytology specimen, a surgical excision, or any combination thereof. A sample or portion thereof can comprise tissues or cells from a tissue type. For example, a sample can comprise a nasal tissue, a trachea tissue, a lung tissue, a pharynx tissue, a larynx tissue, a bronchus tissue, a pleura tissue, an alveoli tissue, breast tissue, bladder tissue, kidney tissue, liver tissue, colon tissue, thyroid tissue, cervical tissue, prostate tissue, heart tissue, muscle tissue, pancreas tissue, anal tissue, bile duct tissue, a bone tissue, brain tissue, spinal tissue, kidney tissue, uterine tissue, ovarian tissue, endometrial tissue, vaginal tissue, vulvar tissue, uterine tissue, stomach tissue, ocular tissue, sinus tissue, penile tissue, salivary gland tissue, gut tissue, gallbladder tissue, gastrointestinal tissue, bladder tissue, brain tissue, spinal tissue, a blood sample, or any combination thereof.

[0104] The term “sequencing” as used herein, can comprise bisulfite-free sequencing, bisulfite sequencing, TET-assisted bisulfite (TAB) sequencing, ACE-sequencing, high-throughput sequencing, Maxam-Gilbert sequencing, massively parallel signature sequencing, Polony sequencing, 454 pyrosequencing, Sanger sequencing, Illumina sequencing, SOLiD sequencing, Ion Torrent semiconductor sequencing, DNA nanoball sequencing, Heliscope single molecule sequencing, single molecule real time (SMRT) sequencing, nanopore sequencing, shot gun sequencing, RNA sequencing, Enigma sequencing, or any combination thereof.

[0105] As used herein a “split-ADAR” or “split-ADAR system” are used interchangeably and refer to (i) a fragment of the catalytic domain of an ADAR that on its own is biological inactive; (ii) a first fragment of a catalytic domain of an ADAR that on its own is biological inactive and a second fragment of a catalytic domain of an ADAR that on its own is biological inactive; (iii) a tether or anchor moiety operably linked to (i) and (ii) directly of via a linker, wherein when (i), (ii) or (iii) are colocalized and interact a function catalytic domain of ADAR is obtained.

[0106] The term “stop codon” intends a three nucleotide contiguous sequence within messenger RNA that signals a termination of translation. Non-limiting examples in RNA include: UAG, UAA, UGA; and in DNA: TAG, TAA or TGA. Unless otherwise noted, the term also includes nonsense mutations within DNA or RNA that introduce a premature stop codon, causing any resulting protein to be abnormally shortened. tRNA that correspond to the various stop codons are known by specific names: amber (UAG), ochre (UAA), and opal (UGA).

[0107] The term “subject,” “host,” “individual,” and “patient” are as used interchangeably herein to refer to animals, typically mammalian animals. Any suitable mammal can be treated by a method or composition described herein. Non-limiting examples of mammals include humans, non-human primates (e.g., apes, gibbons, chimpanzees, orangutans, monkeys, macaques, and the like), domestic animals (e.g., dogs and cats), farm animals (e.g., horses, cows, goats, sheep, and pigs) and experimental animals (e.g., mouse, rat, rabbit, and guinea pig). In some embodiments a mammal is a human. A mammal can be any age or at any stage of development (e.g., an adult, teen, child, infant, or a mammal in utero). A mammal can be male or female. A mammal can be a pregnant female. In some embodiments a subject is a human. In some embodiments, a subject has or is suspected of having a cancer or neoplastic disorder. In other embodiments, a subject has or is suspected of having a disease or disorder associated with aberrant protein expression.

[0108] “TAR” or “tet/TAR” refers to a non-bacteriophage adapter pair from the bovine immunodeficiency virus (BIV). A 15-17 amino acids sequence (SEQ ID NO:27) from the BIV Tat protein are necessary to bind the TAR element GGCUCGUGUAGCUCAUUAGCU CCGAGCC (SEQ ID NO:28).

[0109] “Transfer ribonucleic acid” or “tRNA” is a nucleic acid molecule that helps translate mRNA to protein. tRNA have a distinctive folded structure, comprising three hairpin loops; one of these loops comprises a “stem” portion that encodes an anticodon. The anticodon recognizes the corresponding codon on the mRNA. Each tRNA is “charged with” an amino acid corresponding to the mRNA codon; this “charging” is accomplished by the enzyme tRNA synthetase. Upon tRNA recognition of the codon corresponding to its anticodon, the tRNA transfers the amino acid with which it is charged to the growing amino acid chain to form a polypeptide or protein. Endogenous tRNA can be charged by endogenous tRNA synthetase. Accordingly, endogenous tRNA are typically charged with canonical amino acids. Orthogonal tRNA, derived from an external source, require a corresponding orthogonal tRNA synthetase. Such orthogonal tRNAs may be charged with both canonical and non-canonical amino acids. In some embodiments, the amino acid with which the tRNA is charged may be detectably labeled to enable detection in vivo. Techniques for labeling can include, but are not limited to, click chemistry wherein an azide/alkyne containing unnatural amino acid is added by the orthogonal tRNA/synthetase pair and, thus, can be detected using alkyne/azide comprising fluorophore or other such molecule.

[0110] As used herein, the terms “treating,” “treatment” and the like are used herein to mean obtaining a desired pharmacologic and/or physiologic effect. The effect can be prophylactic in terms of completely or partially preventing a disease, disorder, or condition or sign or symptom thereof, and/or can be therapeutic in terms of a partial or complete cure for a disorder and/or adverse effect attributable to the disorder.

[0111] As used herein, the term “vector” can refer to a nucleic acid construct designed for transfer between different hosts, including but not limited to a plasmid, a virus, a cosmid, a phage, a BAC, a YAC, etc. A “viral vector” is defined as a recombinantly produced virus or viral particle that comprises a polynucleotide to be delivered into a host cell, either in vivo, ex vivo or in vitro. In some embodiments, plasmid vectors can be prepared from commercially available vectors. In other embodiments, viral vectors can be produced from baculoviruses, retroviruses, adenoviruses, AAVs, etc. Examples of viral vectors include retroviral vectors, adenovirus vectors, adeno-associated virus vectors, alphavirus vectors and the like. In one embodiment, the viral vector is a lentiviral vector. Infectious tobacco mosaic virus (TMV)-based vectors can be used to manufacturer proteins and have been reported to express in tobacco leaves (O'Keefe et al. (2009) Proc. Nat. Acad. Sci. USA 106(15):6099-6104). Alphavirus vectors, such as Semliki Forest virus-based vectors and Sindbis virus-based vectors, have also been developed for use in gene therapy and immunotherapy. See, Schlesinger & Dubensky (1999) Curr. Opin. Biotechnol. 5:434-439 and Ying et al. (1999) Nat. Med. 5(7):823-827. In aspects where gene transfer is mediated by a retroviral vector, a vector construct can refer to the polynucleotide comprising the retroviral genome or part thereof, and a gene of interest. Further details as to modern methods of vectors for use in gene transfer can be found in, for example, Kotterman et al. (2015) Viral Vectors for Gene Therapy: Translational and Clinical Outlook Annual Review of Biomedical Engineering 17. A vector can contain both a promoter and a cloning site into which a polynucleotide can be operatively linked. Such vectors are capable of transcribing RNA in vitro or in vivo and are commercially available from sources such as Agilent Technologies (Santa Clara, Calif) and Promega Biotech (Madison, Wis.). In one aspect, the promoter is a pol III promoter.

[0112] A viral vector can be an adeno-associated virus (AAV) vector. An AAV can be a recombinant AAV. An AAV can comprise an AAV1 serotype, an AAV2 serotype, an AAV3 serotype, an AAV4 serotype, an AAV5 serotype, an AAV6 serotype, an AAV7 serotype, an AAV8 serotype, an AAV9 serotype, a derivative of any of these, or any combination thereof. An AAV can be selected from the group consisting of: an AAV1 serotype, an AAV2 serotype, an AAV3 serotype, an AAV4 serotype, an AAV5 serotype, an AAV6 serotype, an AAV7 serotype, an AAV8 serotype, an AAV9 serotype, a derivative of any of these, and any combination thereof. A viral vector can be a modified viral vector. A viral vector can be modified to include a modified protein. In some cases, a viral vector can comprise a modified VP1 protein.

[0113] Adenosine deaminases may be repurposed for site-specific RNA editing by recruiting them to target RNA sequences using engineered ADAR-recruiting RNAs (adRNAs). Genetically encodable and chemically modified RNA-guided adenosine deaminases have potential for therapeutic applications based on correction of point mutations and the repair of premature stop codons both in vitro and in vivo. However, relying on exogenous ADARs may introduce a significant number of transcriptome wide off-target A-to-I edits. One solution to this problem, disclosed herein, is the engineering of adRNAs to enable the recruitment of endogenous ADARs. In this regard, simple long antisense RNA comprising an RNA targeting domain with a given amount of complementarity to a target RNA as described herein can suffice to recruit endogenous ADARs and these adRNAs are both genetically encodable and chemically synthesizable; and using engineered chemically synthesized antisense oligonucleotides can also lead to robust RNA editing via endogenous ADAR recruitment. Although this modality allows for highly specific editing, its applicability may be limited to editing adenosines in certain RNA motifs preferred by the native ADARs, and in tissues with high endogenous ADAR activity. Additionally, it cannot be utilized for novel functionalities such as deamination of cytosine to uracil (C-to-U) editing which requires exogenous delivery of ADAR2 variants. Thus, engineering a genetically encodable RNA-editing tool that efficiently edits RNA with high specificity and activity is essential for enabling broader use of this toolset for biotechnology and therapeutic applications.

[0114] In this regard, the crystal structure of the ADAR2 deaminase domain (ADAR2-DD) and several pioneering biochemical and computational studies have laid the foundation for understanding its catalytic mechanism and target preferences, but a comprehensive knowledge of how mutations and fragmentation affect the ability of the ADAR2-DD to edit RNA is still lacking. To address this, the disclosure provides a quantitative deep mutational scan (DMS) of the ADAR2-DD, measuring the effect of every possible point mutation on enzyme function. The sequence-function map generated from this research, was used to identify novel enhanced variants for A-to-I editing. Additionally, combining information from these sequence-function maps with existing knowledge of the structure and residue conservation scores, a genetically encodable split-ADAR2 system was engineered that enabled efficient and highly specific RNA editing.

[0115] The deep mutational scan assayed all possible single amino acid substitutions of 261 residues of the deaminase domain for their impact on RNA editing yields. This sequence-function map complements structure and biochemistry-based studies and improves the understanding of the enzyme, and serves as a map for engineering novel variants with tailored activity for specific applications. The screening chassis was used to also expand deaminase functionality by performing a domain-wide mutagenesis screen to identify variants that increased activity at 5′-GA-3′ motifs, and through this analysis variants that enabled robust RNA editing are provided.

[0116] The disclosure provides polypeptide and/or polynucleotide sequences for use in gene and protein editing techniques. It should be understood, although not always explicitly stated that the sequences provided herein can be used to provide the expression product as well as substantially identical sequences that produce a protein that has the same biological properties. Specific polypeptide sequences are provided as examples of particular embodiments. Modifications to the sequences to amino acids with alternate amino acids that have similar charge. Additionally, an equivalent polynucleotide is one that hybridizes under stringent conditions to the reference polynucleotide or its complement or in reference to a polypeptide, a polypeptide encoded by a polynucleotide that hybridizes to the reference encoding polynucleotide under stringent conditions or its complementary strand. Alternatively, an equivalent polypeptide or protein is one that is expressed from an equivalent polynucleotide.

[0117] The disclosure provides N496X₂ or an E488X₁/N496X₂ double mutants in ADAR2, wherein X₁ is Q, H, R, K, N, A, M, S, F, L, or W and X₂ is F or Y. In one embodiment, the disclosure provides an N496F or an E488Q/N496F double mutants in ADAR2.

[0118] The disclosure provides a recombinant polypeptide having a sequence selected from the group consisting of: (i) a sequence that is at least 85%, 87%, 90%, 92%, 95%, 98%, or 99% identical to SEQ ID NO:2 and having a E488X₁ mutation and a N496X₂ mutation, wherein X₁ is Q, H, R, K, N, A, M, S, F, L, or W and X₂ is F or Y and wherein the polypeptide can perform a chemical modification on RNA to convert one base to another (e.g., A→I); (ii) a sequence of SEQ ID NO:2 and having a E488X₁ mutation and a N496X₂ mutation, wherein X₁ is Q, H, R, K, N, A, M, S, F, L, or W and X₂ is F or Y and wherein the polypeptide can perform a chemical modification on RNA to convert one base to another (e.g., A→I); (iii) a sequence that is at least 85%, 87%, 90%, 92%, 95%, 98%, or 99% identical SEQ ID NO:2 from amino acid 370-697 and having a E488X₁ mutation and a N496X₂ mutation, wherein X₁ is Q, H, R, K, N, A, M, S, F, L, or W and X₂ is F or Y and wherein the polypeptide can perform a chemical modification on RNA to convert one base to another (e.g., A→I); and (iv) a sequence of SEQ ID NO:2 from amino acid 370-697 and having a E488X₁ mutation and a N496X₂ mutation, wherein X₁ is Q, H, R, K, N, A, M, S, F, L, or W and X₂ is F or Y and wherein the polypeptide can perform a chemical modification on RNA to convert one base to another (e.g., A→I).

[0119] The disclosure further provides recombinant ADAR polypeptide having a sequence selected from SEQ ID NO:29-62 and 63 or catalytically active fragments thereof (e.g., comprising amino acids 316-701) and sequence that are at least 85, 90, 92, 95, 97, 98, or 99% identical thereto.

[0120] The disclosure provides mutant ADAR1 E1008X₁ or S1016X₂ or an E1008X₁/S1016X₂ double mutants in ADAR1, wherein X₁ is Q, H, R, K, N, A, M, S, F, L, or W and X₂ is F or Y. In one embodiment, the disclosure provides an E1008Q or an S1016F double mutants in ADAR1.

[0121] The disclosure also provides a recombinant polypeptide having a sequence selected from the group consisting of: (i) a sequence that is at least 85%, 87%, 90%, 92%, 95%, 98%, or 99% identical to SEQ ID NO:4 and having a E1008X₁ mutation and a S1016X₂ mutation, wherein X₁ is Q, H, R, K, N, A, M, S, F, L, or W and X₂ is F or Y and wherein the polypeptide can perform a chemical modification on RNA to convert one base to another (e.g., A→I); (ii) a sequence of SEQ ID NO:4 and having a E1008X₁ mutation and a S1016X₂ mutation, wherein X₁ is Q, H, R, K, N, A, M, S, F, L, or W and X₂ is F or Y and wherein the polypeptide can perform a chemical modification on RNA to convert one base to another (e.g., A→I); (iii) a sequence that is at least 85%, 87%, 90%, 92%, 95%, 98%, or 99% identical SEQ ID NO:2 from amino acid 886-1221 and having a E1008X₁ mutation and a S1016X₂ mutation, wherein X₁ is Q, H, R, K, N, A, M, S, F, L, or W and X₂ is F or Y and wherein the polypeptide can perform a chemical modification on RNA to convert one base to another (e.g., A→I); and (iv) a sequence of SEQ ID NO:2 from amino acid 886-1221 and having a E1008X₁ mutation and a S1016X₂ mutation, wherein X₁ is Q, H, R, K, N, A, M, S, F, L, or W and X₂ is F or Y and wherein the polypeptide can perform a chemical modification on RNA to convert one base to another (e.g., A→I).

[0122] The disclosure further provides recombinant ADAR polypeptide having a sequence selected from SEQ ID NO:64-97 and 98 or catalytically active fragments thereof (e.g., comprising amino acids 886-1221) and sequence that are at least 85, 90, 92, 95, 97, 98, or 99% identical thereto.

[0123] The disclosure shows that an ADAR2-DD (N496F, E488Q) double mutant was 1.5-2.5 fold more efficient at editing adenosines with a 5′ guanosine than the classic hyperactive ADAR2-DD (E488Q). In some embodiments, an isolated polypeptide as described herein (e.g. an ADAR2 polypeptide) can have a single mutation relative to a wildtype polypeptide, such as a mutation at position 488 of SEQ ID NO: 2 or a mutation at position 496 of SEQ ID NO: 2. In some embodiments, an isolated polypeptide as described herein (e.g. an ADAR2 polypeptide) can have a plurality of mutations relative to a wildtype polypeptide, such as a mutation at position 488 of SEQ ID NO: 2 and a mutation at position 496 of SEQ ID NO: 2.

[0124] In some embodiments, in addition to an N496X mutation, the adenosine deaminase may comprise one or more of the mutations selected from G336D, G487A, G487V, E488Q, E488H, E488R, E488N, E488A, E488S, E488M, T490C, T490S, V493T, V493S, V493A, V493R, V493D, V493P, V493G, N597K, N597R, N597A, N597E, N597H, N597G, N597Y, A589V, S599T, N613K, N613R, N613A, N613E of SEQ ID NO:2. In some embodiments, an ADAR of the disclosure comprises mutation at N496 and one or more additional positions selected from E488, R348, V351, T375, K376, E396, C451, R455, N473, R474, K475, R477, R481, S486, T490, S495, R510.

[0125] In some embodiments, the recombinant ADARs of the disclosure recognize and convert one or more target adenosine residue(s) in a double-stranded nucleic acid substrate into inosine residues (s). In some embodiments, the double-stranded nucleic acid substrate is a RNA-DNA hybrid duplex. In some embodiments, the adenosine deaminase protein recognizes a binding window on the double-stranded substrate. In some embodiments, the binding window contains at least one target adenosine residue(s). In some embodiments, the binding window is in the range of about 3 bp to about 100 bp. In some embodiments, the binding window is in the range of about 5 bp to about 50 bp. In some embodiments, the binding window is in the range of about 10 bp to about 30 bp. In some embodiments, the binding window is about 1 bp, 2 bp, 3 bp, 5 bp, 7 bp, 10 bp, 15 bp, 20 bp, 25 bp, 30 bp, 40 bp, 45 bp, 50 bp, 55 bp, 60 bp, 65 bp, 70 bp, 75 bp, 80 bp, 85 bp, 90 bp, 95 bp, or 100 bp.

[0126] As mentioned above, overexpression of ADARs can lead to several transcriptome wide off-target edits. The ability to restrict the catalytic activity of the ADAR2 DD only to the target mRNA can reduce the number of off-targets. Creation of a split-ADAR2 DD reduces the number of off-targets. Split-protein reassembly or protein fragment complementation can be a widely used approach to study protein-protein interactions. Splitting the ADAR2 DD can be designed in such a way that each fragment of the split-ADAR2 DD can be catalytically inactive by itself. However, in the presence of the adRNA, the split halves can dimerize to form a catalytically active enzyme at the intended mRNA target.

[0127] The deaminase domain of ADAR2 was further analyzed at the fragment level to create split deaminases each of which was inactive by itself but together formed a functional enzyme upon combining at the target site. Accordingly, the disclosure provides split ADARs, wherein one domain of a split ADAR comprises SEQ ID NO:2 from amino acid 316 to about 465 (e.g., 465, 466, 467, or 468) operably linked to a first adapter of an adapter pair (directly or via a linker) and a second domain of a split ADAR comprising SEQ ID NO:2 from about amino acid 466 (e.g., 466, 467, 468, or 469) to the C-terminus (e.g., 701) of SEQ ID NO: 2. Table A provides exemplary split ADAR constructs of the disclosure:

TABLE A
T1 is a tether moiety other than MS2 selected from the group consisting
of tet, PUF, Cas protein, PP7, Qβ, F2, GA, fr, JP501, M12, R17,
BZ13, JP34, JP500, KU1, M11, MX1, TW18, VK, SP, FI, ID2, NL95, TW19,
AP205, φCb5, φCb8r, φCb12r, φCb23r, 7s and PRR1; and
T2 is a tether moiety other than λN selected from the group consisting
of tet, PUF, Cas protein, PP7, Qβ, F2, GA, fr, JP501, M12, R17,
BZ13, JP34, JP500, KU1, M11, MX1, TW18, VK, SP, FI, ID2, NL95, TW19,
AP205, φCb5, φCb8r, φCb12r, φCb23r, 7s and PRR1, wherein
T1 and T2 are not the same in the split ADAR pair:

| Split | | |
|---|---|---|
| ADAR | ADAR domain sequence | Adapter/tether |
| 1 | 85-100% identical to SEQ ID NO: 2 from aa 316-465 | MS2 coat protein or T1 |
| 2 | 85-100% identical to SEQ ID NO: 2 from aa 466-701 | λN (1-4 copies) or T2 |
| 3 | 85-100% identical to SEQ ID NO: 2 from aa 316-465 | λN (1-4 copies) or T2 |
| 4 | 85-100% identical to SEQ ID NO: 2 from aa 466-701 | MS2 coat protein or T1 |
| 5 | 85-100% identical to SEQ ID NO: 2 from aa 316-466 | MS2 coat protein or T1 |
| 6 | 85-100% identical to SEQ ID NO: 2 from aa 467-701 | λN (1-4 copies) or T2 |
| 7 | 85-100% identical to SEQ ID NO: 2 from aa 316-466 | λN (1-4 copies) or T2 |
| 8 | 85-100% identical to SEQ ID NO: 2 from aa 467-701 | MS2 coat protein or T1 |
| 9 | 85-100% identical to SEQ ID NO: 2 from aa 316-467 | MS2 coat protein or T1 |
| 10 | 85-100% identical to SEQ ID NO: 2 from aa 468-701 | λN (1-4 copies) or T2 |
| 11 | 85-100% identical to SEQ ID NO: 2 from aa 316-467 | λN (1-4 copies) or T2 |
| 12 | 85-100% identical to SEQ ID NO: 2 from aa 468-701 | MS2 coat protein or T1 |
| 13 | 85-100% identical to SEQ ID NO: 2 from aa 316-468 | MS2 coat protein or T1 |
| 14 | 85-100% identical to SEQ ID NO: 2 from aa 469-701 | λN (1-4 copies) or T2 |
| 15 | 85-100% identical to SEQ ID NO: 2 from aa 316-468 | λN (1-4 copies) or T2 |
| 16 | 85-100% identical to SEQ ID NO: 2 from aa 469-701 | MS2 coat protein or T1 |

[0128] In the split ADAR constructs 1-16 in Table A, each of pairs (e.g., 1 and 2; 3 and 4 etc.) are recruited to the site of editing by an adRNA comprising an RNA sequence having the general structure (BoxB)-(targeting RNA)-(MS2-targeted stem loop) or (MS2-targeted stem loop)-(targeting RNA)-(BoxB). The targeting RNA can be any sequence that can hybridize to an RNA having a nucleotide to be modified. The flanking BoxB and MS2 targeted step loop domains are described above (e.g., SEQ ID NO:13, 14, 23 and 24).

[0129] In one embodiment, a split ADAR polypeptide of the disclosure comprises a first domain comprising SEQ ID NO:8 or sequence that are at least 85% identical to SEQ ID NO:8 and a second domain comprising SEQ ID NO:10 or sequences that are at least 85% identical to SEQ ID NO:10.

[0130] In one embodiment, a split ADAR polypeptide of the disclosure comprises SEQ ID NO:10 or sequence that are at least 85% identical to SEQ ID NO:10. In another embodiment, a split ADAR polypeptide of the disclosure comprise SEQ ID NO: 10 having a E21X₁ mutation and a N29X₂ mutation, wherein X₁ is Q, H, R, K, N, A, M, S, F, L, or W and X₂ is F or Y.

[0131] In yet another embodiment, an ADAR domain of a split ADAR construct can be linked to an adaptor/tether domain via a linker. Various linkers are selected such that they do not interfere with the function of each domain that is linked by the linker. Accordingly, a recombinant split-ADAR of the disclosure can comprise a (first ADAR domain)-(linker)-(anchor/tether domain).

[0132] The split-ADAR2 of the disclosure was transcript specific (>1000 fold compared to full domain over expression), and with off-target profiles similar to those seen via recruitment of endogenous ADARs. This split-ADAR2 tool paves the way for the use of the highly active ADAR2 deaminase domain variants discovered by deep mutational scans and provide for an enabling broader utility of the ADAR toolset for biotechnology and therapeutic applications. Additionally, these approaches could also be applied to the study and engineering of other RNA modifying enzymes.

[0133] Further completely humanized versions of these constructs can be created by harnessing human RNA binding proteins and adapter/tethering systems, such as (a) U1A or (b) its evolved variant TBP6.7 which has no known endogenous human hairpin targets or (c) the human histone stem loop binding protein (SLBP) or (d) the DNA binding domain of glucocorticoid receptor, or (e) any combination thereof. These proteins can be fused to the N and C terminal fragments of the ADAR2 to create a completely human and programmable RNA editing toolset that can edit adenosines with exquisite specificity. Further, chimeric RNA (adRNA) bearing two of the corresponding RNA hairpins can be utilized to recruit the ADAR2 fragments. Sequences of various RNA hairpins are provided herein.

[0134] The disclosure also provide polynucleotides encoding recombinant polypeptide, fusion constructs and/or adRNAs of the disclosure.

[0135] In one embodiment, the disclosure provides a polynucleotide encoding a polypeptide having a sequence selected from the group consisting of: (i) a sequence that is at least 85%, 87%, 90%, 92%, 95%, 98%, or 99% identical to SEQ ID NO:2 and having a E488X₁ mutation and a N496X₂ mutation, wherein X₁ is Q, H, R, K, N, A, M, S, F, L, or W and X₂ is F or Y and wherein the polypeptide can perform a chemical modification on RNA to convert one base to another (e.g., A→I); (ii) a sequence of SEQ ID NO:2 and having a E488X₁ mutation and a N496X₂ mutation, wherein X₁ is Q, H, R, K, N, A, M, S, F, L, or W and X₂ is F or Y and wherein the polypeptide can perform a chemical modification on RNA to convert one base to another (e.g., A→I); (iii) a sequence that is at least 85%, 87%, 90%, 92%, 95%, 98%, or 99% identical SEQ ID NO:2 from amino acid 370-697 and having a E488X₁ mutation and a N496X₂ mutation, wherein X₁ is Q, H, R, K, N, A, M, S, F, L, or W and X₂ is F or Y and wherein the polypeptide can perform a chemical modification on RNA to convert one base to another (e.g., A→I); and (iv) a sequence of SEQ ID NO:2 from amino acid 370-697 and having a E488X₁ mutation and a N496X₂ mutation, wherein X₁ is Q, H, R, K, N, A, M, S, F, L, or W and X₂ is F or Y and wherein the polypeptide can perform a chemical modification on RNA to convert one base to another (e.g., A→I).

[0136] In another embodiment, the disclosure provides a polynucleotide that hybridizes to a sequence consisting of SEQ ID NO:1 under highly stringent or moderately stringent condition and encodes a polypeptide having a sequence selected from the group consisting of: (i) a sequence that is at least 85%, 87%, 90%, 92%, 95%, 98%, or 99% identical to SEQ ID NO:2 and having a E488X₁ mutation and a N496X₂ mutation, wherein X₁ is Q, H, R, K, N, A, M, S, F, L, or W and X₂ is F or Y and wherein the polypeptide can perform a chemical modification on RNA to convert one base to another (e.g., A→I); (ii) a sequence of SEQ ID NO:2 and having a E488X₁ mutation and a N496X₂ mutation, wherein X₁ is Q, H, R, K, N, A, M, S, F, L, or W and X₂ is F or Y and wherein the polypeptide can perform a chemical modification on RNA to convert one base to another (e.g., A→I); (iii) a sequence that is at least 85%, 87%, 90%, 92%, 95%, 98%, or 99% identical SEQ ID NO:2 from amino acid 370-697 and having a E488X₁ mutation and a N496X₂ mutation, wherein X₁ is Q, H, R, K, N, A, M, S, F, L, or W and X₂ is F or Y and wherein the polypeptide can perform a chemical modification on RNA to convert one base to another (e.g., A→I); and (iv) a sequence of SEQ ID NO:2 from amino acid 370-697 and having a E488X₁ mutation and a N496X₂ mutation, wherein X₁ is Q, H, R, K, N, A, M, S, F, L, or W and X₂ is F or Y and wherein the polypeptide can perform a chemical modification on RNA to convert one base to another (e.g., A→I).

[0137] In yet another embodiment, the disclosure provides a polynucleotide encoding a polypeptide having a sequence selected from the group consisting of: (i) a sequence that is at least 85%, 87%, 90%, 92%, 95%, 98%, or 99% identical to SEQ ID NO:4 and having a E1008X₁ mutation and a S1016X₂ mutation, wherein X₁ is Q, H, R, K, N, A, M, S, F, L, or W and X₂ is F or Y and wherein the polypeptide can perform a chemical modification on RNA to convert one base to another (e.g., A→I); (ii) a sequence of SEQ ID NO:4 and having a E1008X₁ mutation and a S1016X₂ mutation, wherein X₁ is Q, H, R, K, N, A, M, S, F, L, or W and X₂ is F or Y and wherein the polypeptide can perform a chemical modification on RNA to convert one base to another (e.g., A→I); (iii) a sequence that is at least 85%, 87%, 90%, 92%, 95%, 98%, or 99% identical SEQ ID NO:4 from amino acid 886-1221 and having a E1008X₁ mutation and a S1016X₂ mutation, wherein X₁ is Q, H, R, K, N, A, M, S, F, L, or W and X₂ is F or Y and wherein the polypeptide can perform a chemical modification on RNA to convert one base to another (e.g., A→I); and (iv) a sequence of SEQ ID NO:4 from amino acid 886-1221 and having a E1008X₁ mutation and a S1016X₂ mutation, wherein X₁ is Q, H, R, K, N, A, M, S, F, L, or W and X₂ is F or Y and wherein the polypeptide can perform a chemical modification on RNA to convert one base to another (e.g., A→I).

[0138] In another embodiment, the disclosure provides a polynucleotide that hybridizes to a sequence consisting of SEQ ID NO:3 under highly stringent or moderately stringent condition and encodes a polypeptide having a sequence selected from the group consisting of: (i) a sequence that is at least 85%, 87%, 90%, 92%, 95%, 98%, or 99% identical to SEQ ID NO:4 and having a E1008X₁ mutation and a S1016X₂ mutation, wherein X₁ is Q, H, R, K, N, A, M, S, F, L, or W and X₂ is F or Y and wherein the polypeptide can perform a chemical modification on RNA to convert one base to another (e.g., A→I); (ii) a sequence of SEQ ID NO:4 and having a E1008X₁ mutation and a S1016X₂ mutation, wherein X₁ is Q, H, R, K, N, A, M, S, F, L, or W and X₂ is F or Y and wherein the polypeptide can perform a chemical modification on RNA to convert one base to another (e.g., A→I); (iii) a sequence that is at least 85%, 87%, 90%, 92%, 95%, 98%, or 99% identical SEQ ID NO:4 from amino acid 886-1221 and having a E1008X₁ mutation and a S1016X₂ mutation, wherein X₁ is Q, H, R, K, N, A, M, S, F, L, or W and X₂ is F or Y and wherein the polypeptide can perform a chemical modification on RNA to convert one base to another (e.g., A→I); and (iv) a sequence of SEQ ID NO:4 from amino acid 886-1221 and having a E1008X₁ mutation and a S1016X₂ mutation, wherein X₁ is Q, H, R, K, N, A, M, S, F, L, or W and X₂ is F or Y and wherein the polypeptide can perform a chemical modification on RNA to convert one base to another (e.g., A→I).

[0139] In yet another embodiment, the disclosure provides a polynucleotide encoding a polypeptide comprising SEQ ID NO:8 or sequence that are at least 85% identical to SEQ ID NO:8.

[0140] In another embodiment, the disclosure provides a polynucleotide that hybridizes to a sequence consisting of SEQ ID NO:7 under highly stringent or moderately stringent condition and encodes a polypeptide having a sequence of SEQ ID NO:8 or sequence that are at least 85% identical to SEQ ID NO:8.

[0141] In yet another embodiment, the disclosure provides a polynucleotide encoding a polypeptide comprising SEQ ID NO:10 or sequences that are at least 85% identical to SEQ ID NO:10.

[0142] In another embodiment, the disclosure provides a polynucleotide that hybridizes to a sequence consisting of SEQ ID NO:9 under highly stringent or moderately stringent condition and encodes a polypeptide having a sequence of SEQ ID NO:10 or sequence that are at least 85% identical to SEQ ID NO:10.

[0143] In still another embodiment, the disclosure provides a polynucleotide that encodes a polypeptide comprising SEQ ID NO:10 having a E21X₁ mutation and a N29X₂ mutation, wherein X₁ is Q, H, R, K, N, A, M, S, F, L, or W and X₂ is F or Y. In another embodiment, the disclosure provides a polynucleotide that hybridizes to a sequence consisting of SEQ ID NO:9 under highly stringent or moderately stringent condition and encodes a polypeptide comprising SEQ ID NO:10 having a E21X₁ mutation and a N29X₂ mutation, wherein X₁ is Q, H, R, K, N, A, M, S, F, L, or W and X₂ is F or Y.

[0144] A polynucleotide of the disclosure can comprise more than one coding sequence wherein each coding domain are operably linked such that upon expression a multi-domain polypeptide is generated. In some instances, domains of the polynucleotide may be separated by a coding sequence for a peptide linker.

[0145] A vector can be employed to deliver a polynucleotide encoding an adRNA and/or a recombinant ADAR or split-ADAR of the disclosure. A vector can comprise DNA, such as double stranded DNA or single stranded DNA. A vector can comprise RNA. In some cases, the RNA can comprise a base modification. The vector can comprise a recombinant vector. The vector can be a vector that is modified from a naturally occurring vector. The vector can comprise at least a portion of a non-naturally occurring vector. As used herein, the terms “non-naturally occurring” and “engineered” are used interchangeably to refer to the polynucleotides of the disclosure. Any vector can be utilized. In some cases, the vector can comprise a viral vector, a liposome, a nanoparticle, an exosome, an extracellular vesicle, or any combination thereof. In some cases, a viral vector can comprise an adenoviral vector, an adeno-associated viral vector (AAV), a lentiviral vector, a retroviral vector, a portion of any of these, or any combination thereof. In some cases, a nanoparticle vector can comprise a polymeric-based nanoparticle, an aminolipid based nanoparticle, a metallic nanoparticle (such as gold-based nanoparticle), a portion of any of these, or any combination thereof. In some cases, a vector can comprise an AAV vector. A vector can be modified to include a modified VP1 protein (such as an AAV vector modified to include a VP1 protein). An AAV can comprise a serotype—such as an AAV1 serotype, an AAV2 serotype, AAV3 serotype, an AAV4 serotype, AAV5 serotype, an AAV6 serotype, AAV7 serotype, an AAV8 serotype, an AAV9 serotype, a derivative of any of these, or any combination thereof.

[0146] The pharmaceutical compositions for the administration of a split-ADAR, recombinant ADAR and/or AdRNA can be conveniently presented in dosage unit form. The pharmaceutical compositions can be, for example, prepared by uniformly and intimately bringing the compounds provided herein into association with a liquid carrier, a finely divided solid carrier or both, and then, if necessary, shaping the product into the desired formulation. In the pharmaceutical composition the compound provided herein is included in an amount sufficient to produce the desired therapeutic effect. For example, pharmaceutical compositions of the technology can take a form suitable for virtually any mode of administration, including, for example, topical, ocular, oral, buccal, systemic, nasal, injection, infusion, transdermal, rectal, and vaginal, or a form suitable for administration by inhalation or insufflation.

[0147] Systemic formulations include those designed for administration by injection (e.g., subcutaneous, intravenous, infusion, intramuscular, intrathecal, or intraperitoneal injection) as well as those designed for transdermal, transmucosal, oral, or pulmonary administration.

[0148] Useful injectable preparations include sterile suspensions, solutions, or emulsions of the compounds provided herein in aqueous or oily vehicles. The compositions can also contain formulating agents, such as suspending, stabilizing, and/or dispersing agents. The formulations for injection can be presented in unit dosage form, e.g., in ampules or in multidose containers, and can contain added preservatives.

[0149] Alternatively, the injectable formulation can be provided in powder form for reconstitution with a suitable vehicle, including but not limited to sterile pyrogen free water, buffer, and dextrose solution, before use. To this end, the compounds provided herein can be dried using techniques, such as lyophilization, and reconstituted prior to use.

[0150] For transmucosal administration, penetrants appropriate to the barrier to be permeated are used in the formulation.

[0151] For oral administration, the pharmaceutical compositions can take the form of, for example, lozenges, tablets, or capsules prepared by conventional means with pharmaceutically acceptable excipients such as binding agents (e.g., pregelatinised maize starch, polyvinylpyrrolidone, or hydroxypropyl methylcellulose); fillers (e.g., lactose, microcrystalline cellulose, or calcium hydrogen phosphate); lubricants (e.g., magnesium stearate, talc, or silica); disintegrants (e.g., potato starch or sodium starch glycolate); or wetting agents (e.g., sodium lauryl sulfate). The tablets can be coated by methods including, for example, sugars, films, or enteric coatings.

[0152] Compositions intended for oral use can be prepared for the manufacture of pharmaceutical compositions, and such compositions can contain one or more agents selected from the group consisting of sweetening agents, flavoring agents, coloring agents, and preserving agents in order to provide pharmaceutically elegant and palatable preparations. Tablets contain the compounds provided herein in admixture with non-toxic pharmaceutically acceptable excipients which are suitable for the manufacture of tablets. These excipients can be for example, inert diluents, such as calcium carbonate, sodium carbonate, lactose, calcium phosphate or sodium phosphate; granulating and disintegrating agents (e.g., corn starch or alginic acid); binding agents (e.g. starch, gelatin, or acacia); and lubricating agents (e.g., magnesium stearate, stearic acid, or talc). The tablets can be left uncoated or they can be coated by known techniques to delay disintegration and absorption in the gastrointestinal tract and thereby provide a sustained action over a longer period. For example, a time delay material such as glyceryl monostearate or glyceryl distearate can be employed. The pharmaceutical compositions of the technology can also be in the form of oil-in-water emulsions.

[0153] Liquid preparations for oral administration can take the form of, for example, elixirs, solutions, syrups, or suspensions, or they can be presented as a dry product for constitution with water or other suitable vehicle before use. Such liquid preparations can be prepared by conventional means with pharmaceutically acceptable additives such as suspending agents (e.g., sorbitol syrup, cellulose derivatives, or hydrogenated edible fats); emulsifying agents (e.g., lecithin, or acacia); non-aqueous vehicles (e.g., almond oil, oily esters, ethyl alcohol, Cremophore™, or fractionated vegetable oils); and preservatives (e.g., methyl or propyl-p-hydroxybenzoates or sorbic acid). The preparations can also contain buffer salts, preservatives, flavoring, coloring, and sweetening agents as appropriate.

[0154] “Administration” can be effected in one dose, continuously or intermittently throughout the course of treatment. Single or multiple administrations can be carried out with the dose level and pattern being selected by the treating physician. Route of administration can also be determined and can vary with the composition used for treatment, the purpose of the treatment, the health condition or disease stage of the subject being treated, and target cell or tissue. Non-limiting examples of route of administration include oral administration, nasal administration, injection, and topical application.

[0155] Administration can refer to methods that can be used to enable delivery of compounds or compositions (such a DNA constructs, viral vectors, or others) to the desired site of biological action. These methods can include topical administration (such as a lotion, a cream, an ointment) to an external surface of a surface, such as a skin. These methods can include parenteral administration (including intravenous, subcutaneous, intrathecal, intraperitoneal, intramuscular, intravascular or infusion), oral administration, inhalation administration, intraduodenal administration, rectal administration. In some instances, a subject can administer the composition in the absence of supervision. In some instances, a subject can administer the composition under the supervision of a medical professional (e.g., a physician, nurse, physician's assistant, orderly, hospice worker, etc.). In some cases, a medical professional can administer the composition. In some cases, a cosmetic professional can administer the composition.

[0156] Administration or application of a composition disclosed herein can be performed for a treatment duration of at least about at least about 1, 2, 3, 4, 5, 6, 7, 8, 9, 10, 11, 12, 13, 14, 15, 16, 17, 18, 19, 20, 21, 22, 23, 24, 25, 26, 27, 28, 29, 30, 31, 32, 33, 34, 35, 36, 37, 38, 39, 40, 41, 42, 43, 44, 45, 46, 47, 48, 49, 50, 51, 52, 53, 54, 55, 56, 57, 58, 59, 60, 61, 62, 63, 64, 65, 66, 67, 68, 69, 70, 71, 72, 73, 74, 75, 76, 77, 78, 79, 80, 81, 82, 83, 84, 85, 86, 87, 88, 89, 90, 91, 92, 93, 94, 95, 96, 97, 98, 99, or 100 days consecutive or nonconsecutive days. In some cases, a treatment duration can be from about 1 to about 30 days, from about 2 to about 30 days, from about 3 to about 30 days, from about 4 to about 30 days, from about 5 to about 30 days, from about 6 to about 30 days, from about 7 to about 30 days, from about 8 to about 30 days, from about 9 to about 30 days, from about 10 to about 30 days, from about 11 to about 30 days, from about 12 to about 30 days, from about 13 to about 30 days, from about 14 to about 30 days, from about 15 to about 30 days, from about 16 to about 30 days, from about 17 to about 30 days, from about 18 to about 30 days, from about 19 to about 30 days, from about 20 to about 30 days, from about 21 to about 30 days, from about 22 to about 30 days, from about 23 to about 30 days, from about 24 to about 30 days, from about 25 to about 30 days, from about 26 to about 30 days, from about 27 to about 30 days, from about 28 to about 30 days, or from about 29 to about 30 days.

[0157] Administration or application of composition disclosed herein can be performed at least 1, 2, 3, 4, 5, 6, 7, 8, 9, 10, 11, 12, 13, 14, 15, 16, 17, 18, 19, 20, 21, 22, 23, or 24 times a day. In some cases, administration or application of composition disclosed herein can be performed at least 1, 2, 3, 4, 5, 6, 7, 8, 9, 10, 11, 12, 13, 14, 15, 16, 17, 18, 19, 20, or 21 times a week. In some cases, administration or application of composition disclosed herein can be performed at least 1, 2, 3, 4, 5, 6, 7, 8, 9, 10, 11, 12, 13, 14, 15, 16, 17, 18, 19, 20, 21, 22, 23, 24, 25, 26, 27, 28, 29, 30, 31, 32, 33, 34, 35, 36, 37, 38, 39, 40, 41, 42, 43, 44, 45, 46, 47, 48, 49, 50, 51, 52, 53, 54, 55, 56, 57, 58, 59, 60, 61, 62, 63, 64, 65, 66, 67, 68, 69, 70, 71, 72, 73, 74, 75, 76, 77, 78, 79, 80, 81, 82, 83, 84, 85, 86, 87, 88, 89, or 90 times a month.

[0158] In some cases, a composition can be administered/applied as a single dose or as divided doses. In some cases, the compositions described herein can be administered at a first time point and a second time point. In some cases, a composition can be administered such that a first administration is administered before the other with a difference in administration time of 1 hour, 2 hours, 4 hours, 8 hours, 12 hours, 16 hours, 20 hours, 1 day, 2 days, 4 days, 7 days, 2 weeks, 4 weeks, 2 months, 3 months, 4 months, 5 months, 6 months, 7 months, 8 months, 9 months, 10 months, 11 months, 1 year or more.

[0159] In the case of an in vitro application, in some embodiments the effective amount can depend on the size and nature of the application in question. It can also depend on the nature and sensitivity of the in vitro target and the methods in use. The effective amount can comprise one or more administrations of a composition depending on the embodiment.

[0160] A “composition” typically intends a combination of agents, e.g., a recombinant ADAR, split-ADAR and/or an adRNA of this disclosure, along with a compound or composition, and a naturally-occurring or non-naturally-occurring carrier, inert (for example, a detectable agent or label) or active, such as an adjuvant, diluent, binder, stabilizer, buffers, salts, lipophilic solvents, preservative, adjuvant or the like and include pharmaceutically acceptable carriers. Carriers also include pharmaceutical excipients and additives proteins, peptides, amino acids, lipids, and carbohydrates (e.g., sugars, including monosaccharides, di-, tri-, tetra-oligosaccharides, and oligosaccharides; derivatized sugars such as alditols, aldonic acids, esterified sugars and the like; and polysaccharides or sugar polymers), which can be present singly or in combination, comprising alone or in combination 1-99.99% by weight or volume. Exemplary protein excipients include serum albumin such as human serum albumin (HSA), recombinant human albumin (rHA), gelatin, casein, and the like. Representative amino acid/antibody components, which can also function in a buffering capacity, include alanine, arginine, glycine, arginine, betaine, histidine, glutamic acid, aspartic acid, cysteine, lysine, leucine, isoleucine, valine, methionine, phenylalanine, aspartame, and the like. Carbohydrate excipients are also intended within the scope of this technology, examples of which include but are not limited to monosaccharides such as fructose, maltose, galactose, glucose, D-mannose, sorbose, and the like; disaccharides, such as lactose, sucrose, trehalose, cellobiose, and the like; polysaccharides, such as raffinose, melezitose, maltodextrins, dextrans, starches, and the like; and alditols, such as mannitol, xylitol, maltitol, lactitol, xylitol sorbitol (glucitol) and myoinositol.

[0161] A composition described herein can compromise an excipient. An excipient can be added to a stem cell or can be co-isolated with the stem cell from its source. An excipient can comprise a cryo-preservative, such as DMSO, glycerol, polyvinylpyrrolidone (PVP), or any combination thereof. An excipient can comprise a cryo-preservative, such as a sucrose, a trehalose, a starch, a salt of any of these, a derivative of any of these, or any combination thereof. An excipient can comprise a pH agent (to minimize oxidation or degradation of a component of the composition), a stabilizing agent (to prevent modification or degradation of a component of the composition), a buffering agent (to enhance temperature stability), a solubilizing agent (to increase protein solubility), or any combination thereof. An excipient can comprise a surfactant, a sugar, an amino acid, an antioxidant, a salt, a non-ionic surfactant, a solubilizer, a triglyceride, an alcohol, or any combination thereof. An excipient can comprise sodium carbonate, acetate, citrate, phosphate, poly-ethylene glycol (PEG), human serum albumin (HSA), sorbitol, sucrose, trehalose, polysorbate 80, sodium phosphate, sucrose, disodium phosphate, mannitol, polysorbate 20, histidine, citrate, albumin, sodium hydroxide, glycine, sodium citrate, trehalose, arginine, sodium acetate, acetate, HCl, disodium edetate, lecithin, glycerine, xanthan rubber, soy isoflavones, polysorbate 80, ethyl alcohol, water, teprenone, or any combination thereof. An excipient can be an excipient described in the Handbook of Pharmaceutical Excipients, American Pharmaceutical Association (1986).

[0162] Non-limiting examples of suitable excipients can include a buffering agent, a preservative, a stabilizer, a binder, a compaction agent, a lubricant, a chelator, a dispersion enhancer, a disintegration agent, a flavoring agent, a sweetener, a coloring agent.

[0163] In some cases, an excipient can be a buffering agent. Non-limiting examples of suitable buffering agents can include sodium citrate, magnesium carbonate, magnesium bicarbonate, calcium carbonate, and calcium bicarbonate. As a buffering agent, sodium bicarbonate, potassium bicarbonate, magnesium hydroxide, magnesium lactate, magnesium glucomate, aluminium hydroxide, sodium citrate, sodium tartrate, sodium acetate, sodium carbonate, sodium polyphosphate, potassium polyphosphate, sodium pyrophosphate, potassium pyrophosphate, disodium hydrogen phosphate, dipotassium hydrogen phosphate, trisodium phosphate, tripotassium phosphate, potassium metaphosphate, magnesium oxide, magnesium hydroxide, magnesium carbonate, magnesium silicate, calcium acetate, calcium glycerophosphate, calcium chloride, calcium hydroxide and other calcium salts or combinations thereof can be used in a pharmaceutical formulation.

[0164] In some cases, an excipient can comprise a preservative. Non-limiting examples of suitable preservatives can include antioxidants, such as alpha-tocopherol and ascorbate, and antimicrobials, such as parabens, chlorobutanol, and phenol. Antioxidants can further include but not limited to EDTA, citric acid, ascorbic acid, butylated hydroxytoluene (BHT), butylated hydroxy anisole (BHA), sodium sulfite, p-amino benzoic acid, glutathione, propyl gallate, cysteine, methionine, ethanol and N-acetyl cysteine. In some instances a preservatives can include validamycin A, TL-3, sodium ortho vanadate, sodium fluoride, N-a-tosyl-Phe-chloromethylketone, N-a-tosyl-Lys-chloromethylketone, aprotinin, phenylmethylsulfonyl fluoride, diisopropylfluorophosphate, kinase inhibitor, phosphatase inhibitor, caspase inhibitor, granzyme inhibitor, cell adhesion inhibitor, cell division inhibitor, cell cycle inhibitor, lipid signaling inhibitor, protease inhibitor, reducing agent, alkylating agent, antimicrobial agent, oxidase inhibitor, or other inhibitor.

[0165] In some cases, a pharmaceutical formulation can comprise a binder as an excipient. Non-limiting examples of suitable binders can include starches, pregelatinized starches, gelatin, polyvinylpyrolidone, cellulose, methylcellulose, sodium carboxymethylcellulose, ethylcellulose, polyacrylamides, polyvinyloxoazolidone, polyvinylalcohols, C12-C18 fatty acid alcohol, polyethylene glycol, polyols, saccharides, oligosaccharides, and combinations thereof.

[0166] The binders that can be used in a pharmaceutical formulation can be selected from starches such as potato starch, corn starch, wheat starch; sugars such as sucrose, glucose, dextrose, lactose, maltodextrin; natural and synthetic gums; gelatine; cellulose derivatives such as microcrystalline cellulose, hydroxypropyl cellulose, hydroxyethyl cellulose, hydroxypropyl methyl cellulose, carboxymethyl cellulose, methyl cellulose, ethyl cellulose; polyvinylpyrrolidone (povidone); polyethylene glycol (PEG); waxes; calcium carbonate; calcium phosphate; alcohols such as sorbitol, xylitol, mannitol, water or a combination thereof.

[0167] In some cases, a pharmaceutical formulation can comprise a lubricant as an excipient. Non-limiting examples of suitable lubricants can include magnesium stearate, calcium stearate, zinc stearate, hydrogenated vegetable oils, sterotex, polyoxyethylene monostearate, talc, polyethyleneglycol, sodium benzoate, sodium lauryl sulfate, magnesium lauryl sulfate, and light mineral oil. The lubricants that can be used in a pharmaceutical formulation can be selected from metallic stearates (such as magnesium stearate, calcium stearate, aluminium stearate), fatty acid esters (such as sodium stearyl fumarate), fatty acids (such as stearic acid), fatty alcohols, glyceryl behenate, mineral oil, paraffins, hydrogenated vegetable oils, leucine, polyethylene glycols (PEG), metallic lauryl sulphates (such as sodium lauryl sulphate, magnesium lauryl sulphate), sodium chloride, sodium benzoate, sodium acetate and talc or a combination thereof.

[0168] In some cases, a pharmaceutical formulation can comprise a dispersion enhancer as an excipient. Non-limiting examples of suitable dispersants can include starch, alginic acid, polyvinylpyrrolidones, guar gum, kaolin, bentonite, purified wood cellulose, sodium starch glycolate, isoamorphous silicate, and microcrystalline cellulose as high HLB emulsifier surfactants.

[0169] In some cases, a pharmaceutical formulation can comprise a disintegrant as an excipient. In some cases, a disintegrant can be a non-effervescent disintegrant. Non-limiting examples of suitable non-effervescent disintegrants can include starches such as corn starch, potato starch, pregelatinized and modified starches thereof, sweeteners, clays, such as bentonite, micro-crystalline cellulose, alginates, sodium starch glycolate, gums such as agar, guar, locust bean, karaya, pecitin, and tragacanth. In some cases, a disintegrant can be an effervescent disintegrant. Non-limiting examples of suitable effervescent disintegrants can include sodium bicarbonate in combination with citric acid, and sodium bicarbonate in combination with tartaric acid.

[0170] In some cases, an excipient can comprise a flavoring agent. Flavoring agents incorporated into an outer layer can be chosen from synthetic flavor oils and flavoring aromatics; natural oils; extracts from plants, leaves, flowers, and fruits; and combinations thereof. In some cases, an excipient can comprise a sweetener. Non-limiting examples of suitable sweeteners can include glucose (corn syrup), dextrose, invert sugar, fructose, and mixtures thereof (when not used as a carrier); saccharin and its various salts such as a sodium salt; dipeptide sweeteners such as aspartame; dihydrochalcone compounds, glycyrrhizin; Stevia Rebaudiana (Stevioside); chloro derivatives of sucrose such as sucralose; and sugar alcohols such as sorbitol, mannitol, sylitol, and the like.

[0171] The compositions used in accordance with the disclosure, including cells, treatments, therapies, agents, drugs and pharmaceutical formulations can be packaged in dosage unit form for ease of administration and uniformity of dosage. The term “unit dose” or “dosage” can refer to physically discrete units suitable for use in a subject, each unit containing a predetermined quantity of the composition calculated to produce the desired responses in association with its administration, i.e., the appropriate route and regimen. The quantity to be administered, both according to number of treatments and unit dose, depends on the result and/or protection desired. Factors affecting dose include physical and clinical state of the subject, route of administration, intended goal of treatment (alleviation of symptoms versus cure), and potency, stability, and toxicity of the particular composition. Upon formulation, solutions can be administered in a manner compatible with the dosage formulation and in such amount as is therapeutically or prophylactically effective. The formulations are easily administered in a variety of dosage forms, such as the type of injectable solutions described herein.

[0172] As used herein, the term “reduce or eliminate expression and/or function of” can refer to reducing or eliminating the transcription of said polynucleotides into mRNA, or alternatively reducing or eliminating the translation of said mRNA into peptides, polypeptides, or proteins, or reducing or eliminating the functioning of said peptides, polypeptides, or proteins. In a non-limiting example, the transcription of polynucleotides into mRNA is reduced to at least half of its normal level found in wild type cells.

[0173] The phrase “first line” or “second line” or “third line” can refer to the order of treatment received by a patient. First line therapy regimens are treatments given first, whereas second or third line therapy are given after the first line therapy or after the second line therapy, respectively. The National Cancer Institute defines first line therapy as “the first treatment for a disease or condition. In patients with cancer, primary treatment can be surgery, chemotherapy, radiation therapy, or a combination of these therapies. First line therapy is also referred to as “primary therapy and primary treatment.” See National Cancer Institute website at cancer.gov, last visited Nov. 15, 2017. Typically, a patient is given a subsequent chemotherapy regimen because the patient did not show a positive clinical or sub-clinical response to the first line therapy or the first line therapy has stopped.

[0174] The term “contacting” means direct or indirect binding or interaction between two or more entities. A particular example of direct interaction is binding. A particular example of an indirect interaction is where one entity acts upon an intermediary molecule, which in turn acts upon the second referenced entity. Contacting as used herein includes in solution, in solid phase, in vitro, ex vivo, in a cell and in vivo. Contacting in vivo can be referred to as administering, or administration.

[0175] A disease or condition that can be treated using a mutant ADAR of the disclosure can comprise a neurodegenerative disease, a muscular disorder, a metabolic disorder, an ocular disorder, or any combination thereof. The disease or condition can comprise cystic fibrosis, albinism, alpha-1-antitrypsin deficiency, Alzheimer disease, Amyotrophic lateral sclerosis, Asthma, β-thalassemia, Cadasil syndrome, Charcot-Marie-Tooth disease, Chronic Obstructive Pulmonary Disease (COPD), Distal Spinal Muscular Atrophy (DSMA), Duchenne/Becker muscular dystrophy, Dystrophic Epidermolysis bullosa, Epidermylosis bullosa, Fabry disease, Factor V Leiden associated disorders, Familial Adenomatous, Polyposis, Galactosemia, Gaucher's Disease, Glucose-6-phosphate dehydrogenase, Haemophilia, Hereditary Hematochromatosis, Hunter Syndrome, Huntington's disease, Hurler Syndrome, Inflammatory Bowel Disease (IBD), Inherited polyagglutination syndrome, Leber congenital amaurosis, Lesch-Nyhan syndrome, Lynch syndrome, Marfan syndrome, Mucopolysaccharidosis, Muscular Dystrophy, Myotonic dystrophy types I and II, neurofibromatosis, Niemann-Pick disease type A, B and C, NY-esol related cancer, Parkinson's disease, Peutz-Jeghers Syndrome, Phenylketonuria, Pompe's disease, Primary Ciliary Disease, Prothrombin mutation related disorders, such as the Prothrombin G20210A mutation, Pulmonary Hypertension, Retinitis Pigmentosa, Sandhoff Disease, Severe Combined Immune Deficiency Syndrome (SCID), Sickle Cell Anemia, Spinal Muscular Atrophy, Stargardt's Disease, Tay-Sachs Disease, Usher syndrome, X-linked immunodeficiency, various forms of cancer (e.g. BRCA1 and 2 linked breast cancer and ovarian cancer). The disease or condition can comprise a muscular dystrophy, an ornithine transcarbamylase deficiency, a retinitis pigmentosa, a breast cancer, an ovarian cancer, Alzheimer's disease, pain, Stargardt macular dystropy, Charcot-Marie-Tooth disease, Rett syndrome, or any combination thereof. Administration of a composition can be sufficient to: (a) decrease expression of a gene relative to an expression of the gene prior to administration; (b) edit at least one point mutation in a subject, such as a subject in need thereof; (c) edit at least one stop codon in the subject to produce a readthrough of a stop codon; (d) produce an exon skip in the subject, or (e) any combination thereof.

[0176] The following examples are non-limiting and illustrative of procedures which can be used in various instances in carrying the disclosure into effect. Additionally, all reference disclosed herein are incorporated by reference in their entirety.

### EXAMPLES

[0177] Oligonucleotide pools: To create the library of single amino acid substitutions in the ADAR2 deaminase domain, oligonucleotide chip (CustomArray) consisting of 6 oligonucleotide pools (each 168 bp in length) was ordered. These pools, in combination, spanned residues 340-600 of the ADAR2 deaminase domain. Each of these pools was amplified in a 50 μl PCR reaction using Kapa HiFi HotStart PCR Mix (Kapa Biosystems), 40 ng of synthesized oligonucleotide as template and pool-specific primers. The 6 PCR products were purified using the QIAquick PCR Purification Kit (Qiagen) to eliminate byproducts.

[0178] Creation of vectors for cloning oligonucleotide pools: A gene block (IDT) for MCP-ADAR2-DD-NES was ordered and mutagenesis PCR was used to create the MCP-ADAR2-DD(E488Q)-NES. These fragments were then used as templates to generate 6 PCR fragments from which deletions of the MCP-ADAR2-DD-NES and the MCP-ADAR2-DD(E488Q)-NES were created. The deleted regions corresponded to the sequence covered by each of the 6 oligonucleotide pools and was replaced instead with an Esp3I digestion site. To create the plasmid library, the two Esp3I digestion sites in the LentiCRISPR v2 plasmid (Addgene #52961) were mutated using PCR mutagenesis followed by Gibson Assembly. Next, 6 cloning vectors were created for the MCP-ADAR2-DD-NES and MCP-ADAR2-DD(E488Q)-NES, cloning the PCR fragments generated above into the LentiCRISPR v2 vector digested with BamHI and XbaI using Gibson Assembly. All PCRs in this section were carried out using Kapa HiFi HotStart PCR Mix (Kapa Biosystems), 20 ng template and appropriate primers in 20 μl reactions. All digestions in this section were carried out in 50 μl reactions for 3 hours at 37° C. using 2 μg of plasmid and 10 units of enzyme(s). All Gibson Assembly reactions in this section were carried out using 50 ng backbone and 30 ng of insert in a 10 μl volume and incubated at 50° C. for 1 hour. Digestions and PCRs were purified using the QIAquick PCR Purification Kit (Qiagen).

[0179] Creation of plasmid library: Once 6 cloning vectors corresponding to the MCP-ADAR2-DD-NES ready were obtained, they were digested with Esp3I. These digestions were carried out in 50 μl reactions for 6 hours at 37° C. using 2 μg of plasmid and 10 units of enzyme followed by heat inactivation at 65° C. for 20 minutes. The digestion reaction was then purified using the QIAquick PCR Purification Kit (Qiagen). This was followed by cloning of the 6 oligonucleotide pools into their respective cloning vectors via Gibson Assembly using 50 ng of the digested backbone and 10 ng of the purified oligonucleotide PCR products in a 10 μl reaction, incubated at 50° C. for 80 minutes. The Gibson Assembly reaction was purified by dialysis and used to electroporate ElectroMAX Stbl4 cells (ThermoFisher) as per the manufacturer's instructions. A small fraction (1-10 μl) of cultures was spread on carbenicillin LB plates to calculate the library coverage, and the rest of the cultures were amplified overnight in 150 ml LB medium containing carbenicillin. A library coverage of at least 400x was ensured before proceeding. Plasmid libraries were sequenced using the MiSeq (300 bp PE run).

[0180] Creation of MS2-adRNA vectors: The Cas9-P2A-Puromycin from the LentiCRISPR v2 was replaced with a mCherry-P2A-Hygromycin by digesting the backbone with XbaI and PmeI. Fusion PCRs was used to create the mCherry-P2A-Hygromycin-WPRE-3′LTR(Delta U3) insert which was then cloned into the digested backbone via Gibson Assembly. PCR was used to create a MS2-adRNA-mU6-MS2-adRNA cassette which was cloned into the Esp3I digested backbone via Gibson Assembly. 4 vectors with 2x MS2-adRNAs were created targeting 5′ and 3′ TAG and GAC. All PCRs in this section were carried out using Kapa HiFi HotStart PCR Mix (Kapa Biosystems) in 20 μl reactions. All digestions in the section were carried out in 50 μl reactions for 3 hours at 37° C. using 2 μg of plasmid and 10 units of enzymes. All Gibson Assembly reactions in this section were carried out using 50 ng backbone and 20-40 ng of insert in a 10 μl volume and incubated at 50° C. for 1 hour. Digestions and PCRs were purified using the QIAquick PCR Purification Kit (Qiagen).

[0181] Lentivirus production: HEK293FT cells were maintained in DMEM supplemented with 10% FBS (Thermo Fisher) and 1% Antibiotic-Antimycotic (Thermo Fisher) in an incubator at 37° C. and 5% C02 atmosphere. To produce lentivirus particles, HEK293FT cells were seeded in 15-cm tissue culture dishes 1 day before transfection and were 60% confluent at the time of transfection. Before transfection, the culture medium was changed to prewarmed DMEM supplemented with 10% FBS. For each 15-cm dish, 36 μl of Lipofectamine 2000 (Thermo Fisher) was diluted in 1.2 ml OptiMEM (Thermo Fisher). Separately, 3 μg pMD2.G (gift from Didier Trono, Addgene #12259), 12 μg of pCMV delta R8.2 (gift from Didier Trono, Addgene #12263) and 9 μg of lentiviral vector were diluted in 1.2 ml OptiMEM. After incubation for 5 min, the Lipofectamine 2000 mixture and DNA mixture were combined and incubated at room temperature for 30 minutes. The mixture was then added dropwise to HEK293FT cells. Viral particles were harvested 48 h and 72 h after transfection, further concentrated to a final volume of 500-1000 μl using 100 kDA filters (Millipore), divided into aliquots and frozen at −80° C. Lentivirus was produced individually for all MS2-adRNA vectors and in a pooled format for the libraries. While producing lentivirus, libraries were grouped together as 1+2, 3, 4, 5+6 so as to facilitate sequencing using the NovaSeq 6000 (250 bp PE run).

[0182] Creation of a clonal cell line with MS2-adRNA: HEK293FT cells grown in a 6-well plate were transduced with lentiviruses (high MOI) carrying 2× MS2-adRNA targeting 5′ and 3′ TAG and GAC to create 4 different cell lines. For transductions, the lentivirus was mixed with DMEM supplemented with 10% FBS (Thermo Fisher) and Polybrene Transfection reagent (Millipore) at a concentration of 5 μg/ml and added to HEK293FT cells at 40-50% confluency. Hygromycin (Thermo Fisher) was added to the media at a concentration of 100 μg/ml, 48 hours post transduction. Top 1% of mCherry expressing cells for each line were then sorted into a 96 well plate. 3 clones of each of the 4 cell lines were then frozen down.

[0183] Screen: Lentiviral libraries 1+2 and 3 were used to transduce clones with the 5′ TAG and GAC MS2-adRNA and libraries 4 and 5+6 were used to transduce clones with the 3′ TAG and GAC MS2-adRNA stably integrated. Transductions were carried out in duplicates. The lentiviral libraries were mixed with DMEM supplemented with 10% FBS (Thermo Fisher), Hygromycin (Thermo Fisher) at 100 μg/ml, Polybrene Transfection reagent (Millipore) at a concentration of 5 μg/ml and added to the stable clones harboring the MS2-adRNA in a 15 cm dish at 40-50% confluency. To ensure most cells received 0 or 1 ADAR2 variant, cells were transduced at a low MOI of 0.2-0.4. 24 hours post transfections, cells were passaged 1:4 into a new 15 cm dish and grown in DMEM supplemented with 10% FBS (Thermo Fisher) and Hygromycin (Thermo Fisher) at 100 μg/ml. 48 hours post transductions, the growth medium was changed to DMEM supplemented with 10% FBS (Thermo Fisher) and Puromycin (Thermo Fisher) at 3 μg/ml. 72 hours post transduction, fresh growth medium with Puromycin was added to the cells. 96 hours post transductions, the growth media was taken off and cells were washed with PBS and then harvested. Cell pellets were stored at −80° C. until RNA extraction. At least 1000× coverage was maintained at all steps of the screen.

[0184] RNA, cDNA, amplifications, indexing: RNA was extracted using the RNeasy mini kit (Qiagen) as per the manufacturer's instructions. cDNA was synthesized from RNA using the Protoscript II First Strand cDNA synthesis Kit (NEB). To ensure library coverage of 500x, 5 ng of RNA was converted to cDNA per library element in every sample of the screen. The volume of each cDNA reaction was 90 μl with 4.5 μg RNA, 45 μl of the Reaction mix, 9 μl Random primers and 9 μl Enzyme. Samples were incubated in a thermocycler at 25° C. for 5 min; 42° C. for 80 min; 80° C. for 5 min. The entire volume of the cDNA reaction was used to set up PCR reactions. The volume of each PCR reaction was 100 μl with 44 μl cDNA, 6 μl primers (10 μM) and 50 μl Q5 high fidelity master mix (NEB). The thermocycling parameters were: 98° C. for 30 s; 24-28 cycles of 98° C. for 10 s, 62° C. for 15 s, and 72° C. for 35 s; and 72° C. for 2 min. The numbers of cycles were tested to ensure that they fell within the linear phase of amplification. The amplicons were 440-570 bp in length and purified using the QIAquick PCR Purification Kit (Qiagen). To continue maintaining at least 500× coverage, at minimum 0.15 ng of the PCR product per library element was used to set up a second PCR adding indices onto the libraries. This was done in 50 μl reactions using 3 μl dual index primers (NEB), 135 ng purified PCR product from the previous reaction and 25 μl Q5 high fidelity master mix (NEB). The thermocycling parameters were: 98° C. for 30 s; 5-8 cycles of 98° C. for 10 s, 65° C. for 20 s, 72° C. for 35 s; and 72° C. for 2 min. The numbers of cycles were tested to ensure that they fell within the linear phase of amplification. Amplicons were purified with Agencourt AMPure XP beads (Beckman Coulter) at a 0.8 ratio. The libraries were quantified using the Qubit dsDNA HS assay kit (Thermo Fisher) and pooled together at a concentration of 10 nM for sequencing on a 250 bp PE run on the NovaSeq 6000.

[0185] Sequencing analysis: Raw fastq reads were aligned to the ADAR2 reference sequence using minimap2 in short-read mode with default parameters. For libraries with overlapping paired end reads, the reads were first combined using FLASH. The aligned reads were then classified into library members using strict filtering, i.e. reads were only included if they perfectly matched exactly one library member, aside from the target ADAR editing site. The editing rate at this target site was then quantified for each library member and averaged across two replicates with weights for differential coverage. To analyze the degree to which each library member differed in editing rate from the wild-type, a two-proportion Z-test was performed using a pooled sample proportion to calculate the standard error of the sampling distribution, and a two-tailed procedure to calculate p-values. Note that the wild-type rate was restricted to the rate measured within each library, such that each library member was compared only to the wild-type rate measured in the same biological context. Z-scores were calculated as follows, where x is the RNA editing rate, and n is the number of counts:

$$\underline{x} = \frac{{x}_{w t} {n}_{w t} + {x}_{i} {n}_{i}}{{n}_{w t} + {n}_{i}}$$

$$SE = \sqrt{\underline{x} ( 1 - \underline{x} ) ( ( \frac{1}{{n}_{i}} ) + ( \frac{1}{{n}_{wt}} ) )}$$

$${Z}_{i} = \frac{{x}_{i} - {x}_{w t}}{SE}$$

[0186] The library classification and editing quantification procedures were carried out using a custom python package, which can be found at https://github.com/natepalmer/deepak. Heatmap plotting was done with modified code from Enrich2 (https://github.com/FowlerLab/Enrich2).

[0187] Cloning individual mutants: A cloning vector was created with the MCP inserted into the LentiCRISPR v2 vector digested with BamHI and XbaI using Gibson Assembly. This vector was then digested with BamHI to clone the DD mutants. All mutants were created using mutagenesis PCR followed by Gibson Assembly. All PCRs in this section were carried out using Q5 PCR Mix (NEB), 5 ng template and appropriate primers in 20 μl reactions. All digestions in this section were carried out in 50 μl reactions for 3 hours at 37° C. using 3 μg of plasmid and 20 units of enzyme(s). All Gibson Assembly reactions in this section were carried out using 30 ng backbone and 15 ng of insert in a 6 μl volume and incubated at 50° C. for 1 hour. Digestions and PCRs were purified using the QIAquick PCR Purification Kit (Qiagen).

[0188] Luciferase assay: All HEK 293FT cells were grown in DMEM supplemented with 10% FBS and 1% Antibiotic-Antimycotic (Thermo Fisher) in an incubator at 37° C. and 5% C02 atmosphere. All in vitro luciferase experiments for DMS validations were carried out in HEK 293FT cells seeded in 96 well plates, at 25-30% confluency, using 250 ng total plasmid and 0.5 μl of commercial transfection reagent Lipofectamine 2000 (Thermo Fisher). Specifically, every well received 100 ng of the Cluc-W85X(TAG) or Cluc-W85X(TGA) reporters, 50 ng of MCP-ADAR2-DD mutants and 100 ng of the MS2-adRNA plasmids. In cases where less than 3 plasmids were needed, a balancing plasmid was added to keep the total amount per well as 250 ng. 48 hours post transfections, 20 μl of supernatant from cells was added to a Costar black 96 well plate (Corning). For the readout, 50 μl of Cypridina Assay buffer was mixed with 0.5 μl Vargulin substrate (Thermo Fisher) respectively and added to the 96 well plate in the dark. The luminescence was read within 10 minutes on Spectramax i3× or iD3 plate readers (Molecular Devices) with the following settings: 5 s mix before read, 5 s integration time, 1 mm read height.

[0189] RNA editing: RNA editing experiments for targeting 5′-GA-3′ were carried out in HEK 293FT cells seeded in 24 well plates using 1000 ng total plasmid and 2 ul of commercial transfection reagent Lipofectamine 2000 (Thermo Fisher). Specifically, every well received 500 ng each MCP-ADAR2-DD fragments and the adRNA plasmids. Cells were transfected at 25-30% confluence and harvested 48 hours post transfection for quantification of editing. RNA from cells was extracted using the RNeasy Mini Kit (Qiagen). cDNA was synthesized from 500 ng RNA using the Protoscript II First Strand cDNA synthesis Kit (NEB). 1 ul of cDNA was amplified by PCR with primers that amplify about 200 bp surrounding the sites of interest using OneTaq PCR Mix (NEB). The numbers of cycles were tested to ensure that they fell within the linear phase of amplification. PCR products were purified using a PCR Purification Kit (Qiagen) and sent out for Sanger sequencing. The RNA editing efficiency was quantified using the ratio of peak heights G/(A+G).

[0190] Split-ADAR2. Vector design and construction: pAAV_hU6_mU6_CMV_GFP was digested with AflII to clone the NES-FLAG-MCP-linker and linker-4xλN-HA-NES downstream of the CMV promoter which were amplified from the MCP-ADAR2-DD-NLS and 4x-λN-cdADAR2 respectively. AvrII digestion sites were included downstream of the NES-FLAG-MCP-linker and upstream of the linker-4xλN-HA-NES to facilitate cloning of the split fragments. All split fragments were amplified from the MCP-ADAR2-DD-NLS or MCP-ADAR2-DD(E488Q)-NLS. For each split-ADAR2 pair, the N-terminal DD fragment was cloned downstream of the NES-FLAG-MCP-linker and the C-terminal DD fragment was cloned upstream of the linker-4xλN-HA-NES using Gibson Assembly. MS2-MS2, MS2-BoxB, BoxB-MS2 and BoxB-BoxB adRNA were created by annealing primers and cloned downstream of the hU6 promoter into the AgeI+NheI digested pAAV_hU6_mU6_CMV_GFP using Gibson Assembly. All PCRs in this section were carried out using Kapa HiFi HotStart PCR Mix (Kapa Biosystems) in 20 μl reactions. All digestions in this section were carried out in 50 μl reactions for 3 hours at 37° C. using 3 μg of plasmid and 20 units of enzyme(s). All Gibson Assembly reactions in this section were carried out using 40 ng backbone and 5-20 ng of insert in a 10 μl volume and incubated at 50° C. for 1 hour. Digestions and PCRs were purified using the QIAquick PCR Purification Kit (Qiagen).

[0191] Luciferase assay: All HEK 293FT cells were grown in DMEM supplemented with 10% FBS and 1% Antibiotic-Antimycotic (Thermo Fisher) in an incubator at 37° C. and 5% CO₂ atmosphere. All in vitro luciferase experiments for the split-ADAR2 were carried out in HEK 293FT cells seeded in 96 well plates, at 25-30% confluency, using 400 ng total plasmid and 0.6 μl of commercial transfection reagent Lipofectamine 2000 (Thermo Fisher). Specifically, every well received 100 ng each of the Cluc-W85X(TAG) reporter, N- and C-terminal ADAR2 fragments and the adRNA plasmids. In cases where less than 4 plasmids were needed, a balancing plasmid was added to keep the total amount per well as 400 ng. 48 hours post transfections, 20 μl of supernatant from cells was added to a Costar black 96 well plate (Corning). For the readout, 50 μl of Cypridina Glow Assay buffer was mixed with 0.5 μl Vargulin substrate (Thermo Fisher) and added to the 96 well plate in the dark. The luminescence was read within 10 minutes on Spectramax i3× or iD3 plate readers (Molecular Devices) with the following settings: 5s mix before read, 5s integration time, 1 mm read height.

[0192] RNA editing: All in vitro RNA editing experiments were carried out in HEK 293FT cells seeded in 24 well plates using 1500 ng total plasmid and 2 ul of commercial transfection reagent Lipofectamine 2000 (Thermo Fisher). Specifically, every well received 500 ng each of the N- and C-terminal ADAR2 fragments and the adRNA plasmids. In cases where less than 3 plasmids were needed, a balancing plasmid was added to keep the total amount per well as 1500 ng. Cells were transfected at 25-30% confluence and harvested 48 hours post transfection for quantification of editing. RNA from cells was extracted using the RNeasy Mini Kit (Qiagen). cDNA was synthesized from 500 ng RNA using the Protoscript II First Strand cDNA synthesis Kit (NEB). 1 ul of cDNA was amplified by PCR with primers that amplify about 200 bp surrounding the sites of interest using OneTaq PCR Mix (NEB). The numbers of cycles were tested to ensure that they fell within the linear phase of amplification. PCR products were purified using a PCR Purification Kit (Qiagen) and sent out for Sanger sequencing. The RNA editing efficiency was quantified using the ratio of peak heights G/(A+G). RNA-seq libraries were prepared from 250 ng of RNA, using the NEBNext Poly(A) mRNA magnetic isolation module and NEBNext Ultra RNA Library Prep Kit for Illumina. Samples were pooled and loaded on an Illumina Novaseq (100 bp paired-end run) to obtain 40-45 million reads per sample.

[0193] Quantification of RNA-seq A-to-G editing: RNA-seq analysis for quantification of transcriptome-wide A-to-G editing was carried (Katrekar et al., In vivo RNA editing of point mutations via RNA-guided adenosine deaminases. Nat Methods 16, 239-242 (2019)).

[0194] Deep mutational scanning of the ADAR2 deaminase domain. To gain comprehensive insight into how mutations affect the ADAR2 deaminase domain (ADAR2-DD), deep mutational scanning (DMS) was used, a technique that enables simultaneous assessment of the activities of thousands of protein variants. Typically, this approach relies on phenotypic selection methods such as cell fitness or fluorescent reporters that result in an enrichment of beneficial variants and a depletion of deleterious variants. However, as RNA editing yields are not precisely quantifiable using surrogate readouts, the experiments focused on directly measuring enzymatic activity in the screens. To do so, genotype was linked to phenotype by placing the RNA editing site on the same transcript encoding the deaminase variant, and ensuring every cell in the pooled screen received a single library element. This novel approach enabled a quantitative deep mutational scan of the core 261 amino acids (residues 340-600) of the ADAR2-deaminase domain via 4959 (261×19) single amino acid variants, measuring the effect of each mutation on adenosine to inosine (A-to-I) editing yields (FIG. 1A).

[0195] Given the large size of the deaminase domain at >750 bp, the library was created using 6 tiling oligonucleotide pools (FIG. 5A). These pools were cloned into a lentiviral vector containing the MS2 coat protein (MCP) and the remainder of the deaminase domain and a puromycin resistance gene (FIG. 1A, FIG. 5B). Editing sites were chosen within the deaminase domain, outside of the mutated residues, such that an A-to-I change would result in a synonymous mutation. To ensure read length coverage in next generation sequencing, members of the first three library pools were assayed for editing at the 5′ end while the remaining members were assayed at the 3′ end of the deaminase domain (FIG. 5A). Towards this, two HEK293FT clonal cell lines were created with MS2-adRNAs targeting 5′ and 3′ UAG sites integrated into them. The scan was carried out in cell lines harboring these MS2-adRNAs by transducing them with the corresponding libraries at a low MOI (0.2-0.4). Following lentiviral transduction and puromycin selection, RNA was extracted from the harvested cells and reverse transcribed. Relevant regions of the deaminase domain were amplified from the cDNA and sequenced (FIG. 5C). 4958 of the 4959 possible variants were successfully detected. The deaminase domain transcripts for each variant also contained the associated A-to-I editing yields, which were then quantified for both replicates of the DMS (FIG. 5D).

[0196] The scans revealed both intrinsic domain properties, and also several mutations that enhanced RNA editing (FIGS. 1B, 2A). Specifically: 1) As expected, most mutations in conserved regions 442-460 and 469-495 that bind the RNA duplex near the editing site led to a significant decrease in editing efficiency of the enzyme; 2) However, mutating the negatively charged E488 residue, which recognizes the cytosine opposite the flipped adenosine by donating hydrogen bonds, to a positively charged or most polar-neutral amino acids resulted in an improvement in editing efficiency. This is consistent with the previously discovered E488Q mutation which has been shown to improve the catalytic activity of the enzyme; 3) Furthermore, most mutations to residues that contact the flipped adenosine (V351, T375, K376, E396, C451, R455) were observed to be detrimental to enzyme function; 4) Similarly, the residues of the ADAR2-DD that interact with the zinc ion in the active site and the inositol hexakisphosphate (R400, R401, K519, R522, S531, W523, D392, K483, C451, C516, H394 and E396) were all also extremely intolerant to mutations. 5) Additionally, surface exposed residues in general readily tolerated mutations as compared to buried residues.

[0197] To independently validate the results from the DMS, 33 mutants from the DMS whose editing efficiencies ranged from very low to very high as compared to the wild-type ADAR2-DD were individually examined. The mutants were assayed for their ability to repair a premature amber stop codon (UAG) in the cypridina luciferase (cluc) transcript. The majority of the mutants (85%) followed the same trend in the arrayed validations as seen in the pooled screens (FIG. 2B). Additionally, the efficiency of variants in the ADAR2-DD DMS at editing UAG triplets was compared to published mutants and again similar agreement in the activity of a majority of the variants (75%) was observed, together confirming the efficacy of the deep mutational scan.

[0198] Enhancing functionality of the ADAR2 deaminase domain. Building on this platform (FIG. 1A), domain variants were screened that expanded functionality, in particular focusing on mining mutants that improved editing at refractory RNA motifs such as adenosines flanked by a 5′ guanosine. Towards this, two HEK293FT clonal cell lines were created with MS2-adRNAs targeting 5′ and 3′ GAC sites integrated into them. A screen was carried out in cell lines harboring these MS2-adRNAs by transducing them with the corresponding MCP-ADAR2-DD(E488Q) libraries at a low MOI (0.2-0.4), evaluating the potential of 3287 mutants to edit a GAC motif. Similar to above, following lentiviral transduction and selection, RNA was extracted, reverse transcribed, and relevant regions of the deaminase domain amplified, sequenced and analyzed (FIG. 2C). A novel mutant N496F that enhanced editing at a 5′-GA-3′ motif was identified by this method. Interestingly, in the ADAR2-DD crystal structure, the N496 residue is in close proximity to the adenosine on the unedited strand that base pairs with the 5′ uracil flanking the target adenosine (FIG. 2D). This mutant was validated using a cluc luciferase reporter bearing a premature opal stop codon (UGA) and confirmed that the N496F, E488Q double mutant was 3-fold better at restoring luciferase activity as compared to E488Q alone (FIG. 2E). To further confirm that the N496F, E488Q double mutant could be used to efficiently edit adenosines flanked by a 5′ guanosine, the ability of this mutant to edit a GAC and GAG motif in the 3′ UTR and CDS of the endogenous RAB7A and KRAS transcripts respectively was examined. The double mutant N496F, E488Q was 2.5-fold more efficient at editing the GAC motif and 1.5-fold more efficient at editing a GAG motif than the E488Q (FIG. 2E, FIG. 7), together confirming the ability of this novel screening format to discover variants that expand the deaminase domain functionality.

[0199] Improving specificity via splitting of the ADAR2 deaminase domain. In addition to increasing the on-target activity of ADARs at editing adenosines in non-preferred motifs, another challenge towards unlocking their utility as a RNA editing toolset is that of improving specificity. Due to their intrinsic dsRNA binding activity, overexpression of ADARs leads to promiscuous transcriptome wide off-targeting, and thus, when relying on exogenous ADARs, it is important to engineer restriction of the catalytic activity of the overexpressed enzyme only to the target mRNA. It was hypothesized that it might be possible to achieve this by splitting the deaminase domain into two catalytically inactive fragments that come together to form a catalytically active enzyme only at the intended target (FIG. 3A). The MS2 Coat Protein (MCP) and Lambda N (QN) systems have been used to efficiently recruit ADARs, thus, these systems were used to recruit the two split halves, i.e. the N- and C-terminal fragments of the ADAR2-DD. Specifically, constructs were created with cloning sites for N-terminal fragments located downstream of the MCP while those for the C-terminal fragments located upstream of the λN. Chimeric adRNAs were designed to bear a BoxB and a MS2 stem loop along with an antisense domain complementary to the target. Studying the sequence-function map of the ADAR2-DD generated from the DMS (FIG. 1B) as well as its crystal structure 18 putative regions were identified for splitting the protein (FIG. 3B). The resulting 18 different split-ADAR2 pairs were assayed for their ability to repair a premature amber stop codon (UAG) in the cypridina luciferase (cluc) transcript in the presence of the recruiting adRNA bearing BoxB and MS2 stem loops (FIG. 3c). Of these pairs 9-12 showed the best editing efficiency, and notably were all located within residues 465-468 which have low conservation scores across species. Interestingly, this region is flanked by highly conserved amino acids (442-460 and 469-495).

[0200] Every component of the split-ADAR2 system was essential for RNA editing. Specifically, all components and pairs of components were assayed for their ability to restore luciferase activity. The MCP-ADAR2-DD was included as a control. Restoration of luciferase activity was observed when every component of the split-ADAR2 system was delivered, confirming that the individual components lacked enzymatic activity (FIG. 8A). Additionally, the importance of fragment orientation was also confirmed for the formation of a functional enzyme. Towards this, the positions of the N- and C-terminal fragments were switched to create ADAR2-DD_{N}-MCP and λN-ADAR2-DD_{C} in addition to the working MCP-ADAR2-DD_{N} and ADAR2-DD_{C}-λN pair. Each pair of N- and C-terminal fragments wads then tested. Functionality was observed only for the MCP-ADAR2-DD_{N} paired with ADAR2-DD_{C}-λN (FIG. 8B).

[0201] Since MCP and λN are proteins of viral origin these molecules were replaced with the human TAR Binding Protein (TBP) and the Stem Loop Binding Protein (SLBP) respectively to create a humanized split-ADAR2 system with improved translational relevance. In the presence of a chimeric adRNA containing a histone stem loop and a TAR stem loop, restoration of luciferase activity was observed (FIG. 3D). This also confirmed that the split-ADAR2 pair 12 (hereinafter referred to as ADAR2-DD_{N} and ADAR2-DD_{C}) could indeed be recruited for RNA editing using two independent sets of protein-RNA binding systems.

[0202] Experiments were performed to investigate the specificity profiles via analysis of the transcriptome-wide off-target A-to-G editing effected by this system (FIGS. 4A-B and FIGS. 9-10). Each condition from FIG. 4A (where the endogenous RAB7A transcript was targeted) was analyzed by RNA-seq. From each sample, ˜19 million uniquely aligned sequencing read pairs were obtained. Fisher's exact test was used to quantify significant changes in A-to-G editing yields, relative to untransfected cells, at each reference adenosine site having sufficient read coverage. Notably, utilizing the split-ADAR2 system observed a 1100-1400 fold reduction in the number of off-targets as compared to the MCP-ADAR2 system. Excitingly, the specificity profiles of the split-ADAR2 system were comparable to those seen when using endogenous recruitment of ADARs via long antisense RNA (FIGS. 9-10).

[0203] To confirm generalizability of the results, the split-ADAR2 was tested at two additional endogenous loci: an adenosine in the 3′UTR of CKB and an adenosine in the CDS of KRAS, and observed robust editing efficiency of the split-ADAR2 system (FIGS. 4A and 4C). To enable convenient delivery of the split-ADAR2 system an all-in-one vector was created bearing a bicistronic ADAR2-DD_{C}-λN-P2A-MCP-ADAR2-DD_{N} which also enabled higher editing efficiencies across all three loci tested (FIGS. 4A and C). The entire split-ADAR2 system consisting of CMV promoter driven ADAR2-DD_{C}-λN-P2A-MCP-ADAR2-DD_{N} and a human U6 promoter driven BoxB-MS2 adRNA is ˜3500 bp in size and can easily be packaged into a single adeno-associated virus (AAV).

[0204] To test if the split-ADAR2 chassis could be expanded to enable new functionalities, specifically C-to-U editing, a split-RESCUE system was created and confirmed comparable C-to-U RNA editing of the endogenous RAB7A transcript as the full-length MCP-RESCUE (FIG. 4D).

[0205] It will be understood that various modifications may be made without departing from the spirit and scope of this disclosure. Accordingly, other embodiments are within the scope of the following claims.

What is claimed is:

1. An isolated polypeptide comprising a sequence selected from the group consisting of:
(i) a sequence that is at least 85% identical to SEQ ID NO:2 and having a E488X₁ mutation and a N496X₂ mutation, wherein X₁ is Q, H, R, K, N, A, M, S, F, L, or W and X₂ is F or Y or a catalytic domain thereof and wherein the polypeptide performs a chemical modification to a nucleotide;
(ii) a sequence of SEQ ID NO:2 and having a E488X₁ mutation and a N496X₂ mutation, wherein X₁ is Q, H, R, K, N, A, M, S, F, L, or W and X₂ is F or Y or a catalytic domain and wherein the polypeptide performs a chemical modification to a nucleotide;
(iii) a sequence that is at least 85% identical SEQ ID NO:2 from amino acid 316-697 and having a E488X₁ mutation and a N496X₂ mutation, wherein X₁ is Q, H, R, K, N, A, M, S, F, L, or W and X₂ is F or Y or a catalytic domain and wherein the polypeptide performs a chemical modification to a nucleotide; and
(iv) a sequence of SEQ ID NO:2 from amino acid 316-697 and having a E488X₁ mutation and a N496X₂ mutation, wherein X₁ is Q, H, R, K, N, A, M, S, F, L, or W and X₂ is F or Y or a catalytic domain and wherein the polypeptide performs a chemical modification to a nucleotide.

2. An isolated polypeptide comprising a sequence selected from the group consisting of:
(i) a sequence that is at least 85%, 87%, 90%, 92%, 95%, 98%, or 99% identical to SEQ ID NO:4 and having a E1008X₁ mutation and a S1016X₂ mutation, wherein X₁ is Q, H, R, K, N, A, M, S, F, L, or W and X₂ is F or Y or a catalytic domain and wherein the polypeptide performs a chemical modification to a nucleotide;
(ii) a sequence of SEQ ID NO:4 and having a E1008X₁ mutation and a S1016X₂ mutation, wherein X₁ is Q, H, R, K, N, A, M, S, F, L, or W and X₂ is F or Y or a catalytic domain and wherein the polypeptide performs a chemical modification to a nucleotide;
(iii) a sequence that is at least 85%, 87%, 90%, 92%, 95%, 98%, or 99% identical SEQ ID NO:4 from amino acid 886-1221 and having a E1008X₁ mutation and a S1016X₂ mutation, wherein X₁ is Q, H, R, K, N, A, M, S, F, L, or W and X₂ is F or Y or a catalytic domain and wherein the polypeptide performs a chemical modification to a nucleotide; and
(iv) a sequence of SEQ ID NO:4 from amino acid 886-1221 and having a E1008X₁ mutation and a S1016X₂ mutation, wherein X₁ is Q, H, R, K, N, A, M, S, F, L, or W and X₂ is F or Y or a catalytic domain and wherein the polypeptide performs a chemical modification to a nucleotide.

3. The isolated polypeptide of claim 1, further comprising one or more additional mutations selected from the group consisting of: G336D, G487A, G487V, T490C, T490S, V493T, V493S, V493A, V493R, V493D, V493P, V493G, N597K, N597R, N597A, N597E, N597H, N597G, N597Y, A589V, S599T, N613K, N613R, N613A, and N613E of SEQ ID NO:2.

4. The isolated polypeptide of claim 1, further comprising one or more additional mutations at R348, V351, T375, K376, E396, C451, R455, N473, R474, K475, R477, R481, S486, T490, S495, and/or R510.

5. A composition comprising an isolated polypeptide of any one of claims 1-4 and a polynucleotide.

6. An isolated polynucleotide encoding the polypeptide of any one of claim 1-4.

7. The isolated polynucleotide of claim 6, wherein the polynucleotide hybridizes under moderate to stringent conditions to polynucleotide consisting of SEQ ID NO:1 or 3.

8. A vector comprising the isolated polynucleotide of claim 6.

9. A host cell comprising a polynucleotide of claim 6.

10. A host cell comprising the vector of claim 8.

11. A recombinant polypeptide having a sequence that is at least 85% identical to SEQ ID NO:2 from about amino acid 316 to 465, 466, 467, 468, or 469.

12. The recombinant polypeptide of claim 11, comprising a sequence that is at least 85% identical to SEQ ID NO:10.

13. The recombinant polypeptide of claim 12, wherein the polypeptide is at least 85% identical to SEQ ID NO:10 and has a E21X₁ mutation and a N29X₂ mutation, wherein X₁ is Q, H, R, K, N, A, M, S, F, L, or W and X₂ is F or Y.

14. The recombinant polypeptide of claim 12, further comprising a tethering moiety.

15. The recombinant polypeptide of claim 14, wherein the tethering moiety comprises a MS2 coat protein peptide, a PP7 peptide, a LambdaN peptide, a tet peptide or a programmable PUF domain.

16. A recombinant polypeptide having a sequence that is at least 85% identical to SEQ ID NO:2 from about amino acid 466, 467, 468, 469, or 470 to amino acid 701.

17. The recombinant polypeptide of claim 16, comprising a sequence that is at least 85% identical to SEQ ID NO:8.

18. The recombinant polypeptide of claim 16, further comprising a tethering moiety.

19. The recombinant polypeptide of claim 18, wherein the tethering moiety comprises a MS2 coat protein peptide, a PP7 peptide, a LambdaN peptide, a tet peptide or a programmable PUF domain.

20. An isolated polynucleotide encoding a polypeptide of any one of claims 11-15.

21. An isolated polynucleotide encoding a polypeptide of any one of claims 17-20.

22. At least one vector comprising the isolated polynucleotide of claim 20 and 21.

23. A host cell comprising the polynucleotide of any one of claims 11-15.

24. A host cell comprising the polynucleotide of any one of claims 17-19.

25. A host cell comprising the at least one vector of claim 22.

26. An engineered, non-naturally occurring system suitable for modifying a target RNA, comprising:
a first polypeptide having a sequence that is at least 85% identical to SEQ ID NO:10 and has a E21X₁ mutation and a N29X₂ mutation, wherein X₁ is Q, H, R, K, N, A, M, S, F, L, or W and X₂ is F or Y, operably linked to a first tethering moiety or a nucleotide sequence encoding the first polypeptide operably linked to a first tethering moiety;
a second polypeptide having a sequence that is at least 85% identical to SEQ ID NO:8 operably linked to a second tethering moiety or a nucleotide sequence encoding the second polypeptide operably linked to the second tethering moiety; and
a guide RNA comprising a guide sequence having a degree of complementarity with a target RNA that comprises an adenine or cytidine and having at a first end a cognate to the first tethering moiety and at the opposite second end a cognate to the second tethering moiety;
wherein said first and second polypeptide interact with the guide RNA at the target RNA to modify the target RNA.

27. An engineered, non-naturally occurring system suitable for modifying a target RNA, comprising:
a polypeptide of claim 1 or catalytic domain thereof, or a nucleotide sequence encoding the polypeptide or catalytic domain thereof, and
a guide RNA comprising a guide sequence having a degree of complementarity with a target RNA that comprises an adenine or cytidine; wherein said polypeptide or catalytic domain thereof interacts with the guide RNA at the target RNA to modify the target RNA.

28. An engineered, non-naturally occurring system suitable for modifying a target RNA, comprising:
a polypeptide of claim 2 or catalytic domain thereof, or a nucleotide sequence encoding the polypeptide or catalytic domain thereof, and
a guide RNA comprising a guide sequence having a degree of complementarity with a target RNA that comprises an adenine or cytidine; wherein said polypeptide or catalytic domain thereof interacts with the guide RNA at the target RNA to modify the target RNA.

29. The system of claim 26, 27, or 28, wherein said guide sequence comprises a non-pairing nucleotide at a position corresponding to said adenosine or cytidine resulting in a mismatch in a double stranded substrate formed between the guide RNA and the target RNA.

30. The system of claim 26, wherein the system comprises one or more vectors comprising:
(i) a first regulatory element operably linked to a nucleotide sequence encoding the guide molecule;
(ii) a second regulatory element operably linked to a nucleotide sequence encoding the first polypeptide; and
(iii) an optional third regulatory element operably linked to a nucleotide sequence encoding the second polypeptide, wherein the nucleotide sequence encoding the second polypeptide is under control of the second or third regulatory element.

31. The system of claim 30, wherein the nucleotide sequence encoding the first polypeptide and the nucleotide sequence encoding the second polypeptide are separated by a linker sequence encoding a cleavable peptide.

32. The system of claim 31, wherein the cleavable peptide is a 2A or 2A-like peptide sequence.

33. The system of claim 26, wherein the first polypeptide, second polypeptide are fused to the first tethering moiety and second tethering moiety, respectively, by an linker.

34. The system of claim 26, wherein the first and second tethering moieties are independently selected from the group consisting of MS2, PP7, Qβ, F2, GA, fr, JP501, M12, R17, BZ13, JP34, JP500, KU1, M11, MX1, TW18, VK, SP, FI, ID2, NL95, TW19, AP205, φCb5, φCb8r, φCb12r, φCb23r, 7s and PRR1 and wherein the first and second tethering moieties are not the same.

35. The system of claim 26, 27, or 28, wherein said guide sequence has a length of from about 10 to about 100 nucleotides.

36. The system of claim 26, 27, or 28, wherein the polypeptide, first polypeptide and/or second polypeptide further comprises one or more nuclear export signal(s) (NES(s)) or nuclear localization signal(s) (NLS(s)).

37. A method of modifying a protein encoded by a target RNA comprising: contacting the target RNA with the system of any one of claims 26, 27, or 28.

38. The method of claim 37, wherein the modifying of the protein treat or prevents a disease or disorder.

39. The method of claim 38, wherein the disease is selected from cystic fibrosis, albinism, alpha-1-antitrypsin deficiency, Alzheimer disease, Amyotrophic lateral sclerosis, Asthma, β-thalassemia, Cadasil syndrome, Charcot-Marie-Tooth disease, Chronic Obstructive Pulmonary Disease (COPD), Distal Spinal Muscular Atrophy (DSMA), Duchenne/Becker muscular dystrophy, Dystrophic Epidermolysis bullosa, Epidermylosis bullosa, Fabry disease, Factor V Leiden associated disorders, Familial Adenomatous, Polyposis, Galactosemia, Gaucher's Disease, Glucose-6-phosphate dehydrogenase, Haemophilia, Hereditary Hematochromatosis, Hunter Syndrome, Huntington's disease, Hurler Syndrome, Inflammatory Bowel Disease (IBD), Inherited polyagglutination syndrome, Leber congenital amaurosis, Lesch-Nyhan syndrome, Lynch syndrome, Marfan syndrome, Mucopolysaccharidosis, Muscular Dystrophy, Myotonic dystrophy types I and II, neurofibromatosis, Niemann-Pick disease type A, B and C, NY-esol related cancer, Parkinson's disease, Peutz-Jeghers Syndrome, Phenylketonuria, Pompe's disease, Primary Ciliary Disease, Prothrombin mutation related disorders, such as the Prothrombin G20210A mutation, Pulmonary Hypertension, Retinitis Pigmentosa, Sandhoff Disease, Severe Combined Immune Deficiency Syndrome (SCID), Sickle Cell Anemia, Spinal Muscular Atrophy, Stargardt's Disease, Tay-Sachs Disease, Usher syndrome, X-linked immunodeficiency, various forms of cancer (e.g. BRCA1 and 2 linked breast cancer and ovarian cancer), an omithine transcarbamylase deficiency, Alzheimer's disease, pain, and Rett syndrome.

40. A method for modifying a target site within a DNA-RNA hybrid molecule, the method comprising contacting the hybrid molecule with an adenosine deaminase that acts on RNA (ADAR), wherein the ADAR comprises a polypeptide of claim 1 or 2 or an engineered system of claim 26.

41. The method of claim 40, wherein the ADAR comprises an ADAR catalytic domain of SEQ ID NO:2 from amino acid 316 to 701.

42. The method of claim 40, wherein modifying the target site comprises modifying the DNA strand of the hybrid molecule.

43. A composition comprising (i) a first fusion protein comprising a polypeptide of claim 11 or 13 operably linked to a first tethering moiety and a second fusion protein comprising a polypeptide of claim 15 or 16 operably linked to a second tethering moiety, or (ii) at least one polynucleotide encoding (i); wherein the first and second tethering moieties are different.

44. An isolated polypeptide comprising an amino acid sequence with a first mutation at position 488 of SEQ ID NO:2 and a second mutation at position 496 of SEQ ID NO:2, wherein the first mutation is a Q, H, R, K, N, A, M, S, F, L, or W mutation and the second mutation is an F or Y mutation, wherein excluding the first mutation and the second mutation, the polypeptide has at least about 85% sequence identity to SEQ ID NO:2, and wherein the polypeptide deaminates an adenosine in a nucleotide of a double stranded nucleic acid substrate, as determined by an in vitro assay.

45. An isolated polypeptide comprising an amino acid sequence with a first mutation at position 1008 of SEQ ID NO:4 and a second mutation at position 1016 of SEQ ID NO:4, wherein the first mutation is a Q, H, R, K, N, A, M, S, F, L, or W mutation and the second mutation is an F or Y mutation, wherein excluding the first mutation and the second mutation, the polypeptide has at least about 85% sequence identity to SEQ ID NO:4, and wherein the polypeptide deaminates an adenosine in a nucleotide of a double stranded nucleic acid substrate, as determined by an in vitro assay.

The application's sequence listing, which the Patent Office published only in electronic form, follows.

SEQUENCE LISTING (98 sequences)

SEQ ID NO: 1 - DNA, 2106 bp, Homo sapiens
  CDS (1)..(2106)
atggatatagaagatgaagaaaacatgagttccagcagcactgatgtgaaggaaaaccgcaatctggacaacgtgtcccccaaggatggcagcacacctgggcctggcgagggctctcagctctccaatgggggtggtggtggccccggcagaaagcggcccctggaggagggcagcaatggccactccaagtaccgcctgaagaaaaggaggaaaacaccagggcccgtcctccccaagaacgccctgatgcagctgaatgagatcaagcctggtttgcagtacacactcctgtcccagactgggcccgtgcacgcgcctttgtttgtcatgtctgtggaggtgaatggccaggtttttgagggctctggtcccacaaagaaaaaggcaaaactccatgctgctgagaaggccttgaggtctttcgttcagtttcctaatgcctctgaggcccacctggccatggggaggaccctgtctgtcaacacggacttcacatctgaccaggccgacttccctgacacgctcttcaatggttttgaaactcctgacaaggcggagcctcccttttacgtgggctccaatggggatgactccttcagttccagcggggacctcagcttgtctgcttccccggtgcctgccagcctagcccagcctcctctccctgtcttaccaccattcccacccccgagtgggaagaatcccgtgatgatcttgaacgaactgcgcccaggactcaagtatgacttcctctccgagagcggggagagccatgccaagagcttcgtcatgtctgtggtcgtggatggtcagttctttgaaggctcggggagaaacaagaagcttgccaaggcccgggctgcgcagtctgccctggccgccatttttaacttgcacttggatcagacgccatctcgccagcctattcccagtgagggtcttcagctgcatttaccgcaggttttagctgacgctgtctcacgcctggtcctgggtaagtttggtgacctgaccgacaacttctcctcccctcacgctcgcagaaaagtgctggctggagtcgtcatgacaacaggcacagatgttaaagatgccaaggtgataagtgtttctacaggaacaaaatgtattaatggtgaatacatgagtgatcgtggccttgcattaaatgactgccatgcagaaataatatctcggagatccttgctcagatttctttatacacaacttgagctttacttaaataacaaagatgatcaaaaaagatccatctttcagaaatcagagcgaggggggtttaggctgaaggagaatgtccagtttcatctgtacatcagcacctctccctgtggagatgccagaatcttctcaccacatgagccaatcctggaagaaccagcagatagacacccaaatcgtaaagcaagaggacagctacggaccaaaatagagtctggtgaggggacgattccagtgcgctccaatgcgagcatccaaacgtgggacggggtgctgcaaggggagcggctgctcaccatgtcctgcagtgacaagattgcacgctggaacgtggtgggcatccagggatccctgctcagcattttcgtggagcccatttacttctcgagcatcatcctgggcagcctttaccacggggaccacctttccagggccatgtaccagcggatctccaacatagaggacctgccacctctctacaccctcaacaagcctttgctcagtggcatcagcaatgcagaagcacggcagccagggaaggcccccaacttcagtgtcaactggacggtaggcgactccgctattgaggtcatcaacgccacgactgggaaggatgagctgggccgcgcgtcccgcctgtgtaagcacgcgttgtactgtcgctggatgcgtgtgcacggcaaggttccctcccacttactacgctccaagattaccaagcccaacgtgtaccatgagtccaagctggcggcaaaggagtaccaggccgccaaggcgcgtctgttcacagccttcatcaaggcggggctgggggcctgggtggagaagcccaccgagcaggaccagttctcactcacgccctga

SEQ ID NO: 2 - protein, 701 aa, Homo sapiens
MDIEDEENMSSSSTDVKENRNLDNVSPKDGSTPGPGEGSQLSNGGGGGPGRKRPLEEGSNGHSKYRLKKRRKTPGPVLPKNALMQLNEIKPGLQYTLLSQTGPVHAPLFVMSVEVNGQVFEGSGPTKKKAKLHAAEKALRSFVQFPNASEAHLAMGRTLSVNTDFTSDQADFPDTLFNGFETPDKAEPPFYVGSNGDDSFSSSGDLSLSASPVPASLAQPPLPVLPPFPPPSGKNPVMILNELRPGLKYDFLSESGESHAKSFVMSVVVDGQFFEGSGRNKKLAKARAAQSALAAIFNLHLDQTPSRQPIPSEGLQLHLPQVLADAVSRLVLGKFGDLTDNFSSPHARRKVLAGVVMTTGTDVKDAKVISVSTGTKCINGEYMSDRGLALNDCHAEIISRRSLLRFLYTQLELYLNNKDDQKRSIFQKSERGGFRLKENVQFHLYISTSPCGDARIFSPHEPILEEPADRHPNRKARGQLRTKIESGEGTIPVRSNASIQTWDGVLQGERLLTMSCSDKIARWNVVGIQGSLLSIFVEPIYFSSIILGSLYHGDHLSRAMYQRISNIEDLPPLYTLNKPLLSGISNAEARQPGKAPNFSVNWTVGDSAIEVINATTGKDELGRASRLCKHALYCRWMRVHGKVPSHLLRSKITKPNVYHESKLAAKEYQAAKARLFTAFIKAGLGAWVEKPTEQDQFSLTP

SEQ ID NO: 3 - DNA, 3681 bp, Homo sapiens
  CDS (1)..(3681)
atgaatccgcggcaggggtattccctcagcggatactacacccatccatttcaaggctatgagcacagacagctcaggtaccagcagcctgggccaggatcttcccccagtagtttcctgcttaagcaaatagaatttctcaaggggcagctcccagaagcaccggtgattggaaagcagacaccgtcactgccaccttccctcccaggactccggccaaggtttccagtactacttgcctccagtaccagaggcaggcaagtggacatcaggggtgtccccaggggcgtgcatctcagaagtcaggggctccagagagggttccagcatccttcaccacgtggcaggagtctgccacagagaggtgttgattgcctttcctcacatttccaggaactgagtatctaccaagatcaggaacaaaggatcttaaagttcctggaagagcttggggaagggaaggccaccacagcacatgatctgtctgggaaacttgggactccgaagaaagaaatcaatcgagttttatactccctggcaaagaagggcaagctacagaaagaggcaggaacaccccctttgtggaaaatcgcggtctccactcaggcttggaaccagcacagcggagtggtaagaccagacggtcatagccaaggagccccaaactcagacccgagtttggaaccggaagacagaaactccacatctgtctcagaagatcttcttgagccttttattgcagtctcagctcaggcttggaaccagcacagcggagtggtaagaccagacagtcatagccaaggatccccaaactcagacccaggtttggaacctgaagacagcaactccacatctgccttggaagatcctcttgagtttttagacatggccgagatcaaggagaaaatctgcgactatctcttcaatgtgtctgactcctctgccctgaatttggctaaaaatattggccttaccaaggcccgagatataaatgctgtgctaattgacatggaaaggcagggggatgtctatagacaagggacaacccctcccatatggcatttgacagacaagaagcgagagaggatgcaaatcaagagaaatacgaacagtgttcctgaaaccgctccagctgcaatccctgagaccaaaagaaacgcagagttcctcacctgtaatatacccacatcaaatgcctcaaataacatggtaaccacagaaaaagtggagaatgggcaggaacctgtcataaagttagaaaacaggcaagaggccagaccagaaccagcaagactgaaaccacctgttcattacaatggcccctcaaaagcagggtatgttgactttgaaaatggccagtgggccacagatgacatcccagatgacttgaatagtatccgcgcagcaccaggtgagtttcgagccatcatggagatgccctccttctacagtcatggcttgccacggtgttcaccctacaagaaactgacagagtgccagctgaagaaccccatcagcgggctgttagaatatgcccagttcgctagtcaaacctgtgagttcaacatgatagagcagagtggaccaccccatgaacctcgatttaaattccaggttgtcatcaatggccgagagtttcccccagctgaagctggaagcaagaaagtggccaagcaggatgcagctatgaaagccatgacaattctgctagaggaagccaaagccaaggacagtggaaaatcagaagaatcatcccactattccacagagaaagaatcagagaagactgcagagtcccagacccccaccccttcagccacatccttcttttctgggaagagccccgtcaccacactgcttgagtgtatgcacaaattggggaactcctgcgaattccgtctcctgtccaaagaaggccctgcccatgaacccaagttccaatactgtgttgcagtgggagcccaaactttccccagtgtgagtgctcccagcaagaaagtggcaaagcagatggccgcagaggaagccatgaaggccctgcatggggaggcgaccaactccatggcttctgataaccagcctgaaggtatgatctcagagtcacttgataacttggaatccatgatgcccaacaaggtcaggaagattggcgagctcgtgagatacctgaacaccaaccctgtgggtggccttttggagtacgcccgctcccatggctttgctgctgaattcaagttggtcgaccagtccggacctcctcacgagcccaagttcgtttaccaagcaaaagttgggggtcgctggttcccagccgtctgcgcacacagcaagaagcaaggcaagcaggaagcagcagatgcggctctccgtgtcttgattggggagaacgagaaggcagaacgcatgggtttcacagaggtaaccccagtgacaggggccagtctcagaagaactatgctcctcctctcaaggtccccagaagcacagccaaagacactccctctcactggcagcaccttccatgaccagatagccatgctgagccaccggtgcttcaacactctgactaacagcttccagccctccttgctcggccgcaagattctggccgccatcattatgaaaaaagactctgaggacatgggtgtcgtcgtcagcttgggaacagggaatcgctgtgtgaaaggagattctctcagcctaaaaggagaaactgtcaatgactgccatgcagaaataatctcccggagaggcttcatcaggtttctctacagtgagttaatgaaatacaactcccagactgcgaaggatagtatatttgaacctgctaagggaggagaaaagctccaaataaaaaagactgtgtcattccatctgtatatcagcactgctccgtgtggagatggcgccctctttgacaagtcctgcagcgaccgtgctatggaaagcacagaatcccgccactaccctgtcttcgagaatcccaaacaaggaaagctccgcaccaaggtggagaacggagaaggcacaatccctgtggaatccagtgacattgtgcctacgtgggatggcattcggctcggggagagactccgtaccatgtcctgtagtgacaaaatcctacgctggaacgtgctgggcctgcaaggggcactgttgacccacttcctgcagcccatttatctcaaatctgtcacattgggttaccttttcagccaagggcatctgacccgtgctatttgctgtcgtgtgacaagagatgggagtgcatttgaggatggactacgacatccctttattgtcaaccaccccaaggttggcagagtcagcatatatgattccaaaaggcaatccgggaagactaaggagacaagcgtcaactggtgtctggctgatggctatgacctggagatcctggacggtaccagaggcactgtggatgggccacggaatgaattgtcccgggtctccaaaaagaacatttttcttctatttaagaagctctgctccttccgttaccgcagggatctactgagactctcctatggtgaggccaagaaagctgcccgtgactacgagacggccaagaactacttcaaaaaaggcctgaaggatatgggctatgggaactggattagcaaaccccaggaggaaaagaacttttatctctgcccagtatag

SEQ ID NO: 4 - protein, 1226 aa, Homo sapiens
MNPRQGYSLSGYYTHPFQGYEHRQLRYQQPGPGSSPSSFLLKQIEFLKGQLPEAPVIGKQTPSLPPSLPGLRPRFPVLLASSTRGRQVDIRGVPRGVHLRSQGLQRGFQHPSPRGRSLPQRGVDCLSSHFQELSIYQDQEQRILKFLEELGEGKATTAHDLSGKLGTPKKEINRVLYSLAKKGKLQKEAGTPPLWKIAVSTQAWNQHSGVVRPDGHSQGAPNSDPSLEPEDRNSTSVSEDLLEPFIAVSAQAWNQHSGVVRPDSHSQGSPNSDPGLEPEDSNSTSALEDPLEFLDMAEIKEKICDYLFNVSDSSALNLAKNIGLTKARDINAVLIDMERQGDVYRQGTTPPIWHLTDKKRERMQIKRNTNSVPETAPAAIPETKRNAEFLTCNIPTSNASNNMVTTEKVENGQEPVIKLENRQEARPEPARLKPPVHYNGPSKAGYVDFENGQWATDDIPDDLNSIRAAPGEFRAIMEMPSFYSHGLPRCSPYKKLTECQLKNPISGLLEYAQFASQTCEFNMIEQSGPPHEPRFKFQVVINGREFPPAEAGSKKVAKQDAAMKAMTILLEEAKAKDSGKSEESSHYSTEKESEKTAESQTPTPSATSFFSGKSPVTTLLECMHKLGNSCEFRLLSKEGPAHEPKFQYCVAVGAQTFPSVSAPSKKVAKQMAAEEAMKALHGEATNSMASDNQPEGMISESLDNLESMMPNKVRKIGELVRYLNTNPVGGLLEYARSHGFAAEFKLVDQSGPPHEPKFVYQAKVGGRWFPAVCAHSKKQGKQEAADAALRVLIGENEKAERMGFTEVTPVTGASLRRTMLLLSRSPEAQPKTLPLTGSTFHDQIAMLSHRCFNTLTNSFQPSLLGRKILAAIIMKKDSEDMGVVVSLGTGNRCVKGDSLSLKGETVNDCHAEIISRRGFIRFLYSELMKYNSQTAKDSIFEPAKGGEKLQIKKTVSFHLYISTAPCGDGALFDKSCSDRAMESTESRHYPVFENPKQGKLRTKVENGEGTIPVESSDIVPTWDGIRLGERLRTMSCSDKILRWNVLGLQGALLTHFLQPIYLKSVTLGYLFSQGHLTRAICCRVTRDGSAFEDGLRHPFIVNHPKVGRVSIYDSKRQSGKTKETSVNWCLADGYDLEILDGTRGTVDGPRNELSRVSKKNIFLLFKKLCSFRYRRDLLRLSYGEAKKAARDYETAKNYFKKGLKDMGYGNWISKPQEEKNFYLCPV

SEQ ID NO: 5 - DNA, 2796 bp, Homo sapiens
  CDS (1)..(2796)
atggccgagatcaaggagaaaatctgcgactatctcttcaatgtgtctgactcctctgccctgaatttggctaaaaatattggccttaccaaggcccgagatataaatgctgtgctaattgacatggaaaggcagggggatgtctatagacaagggacaacccctcccatatggcatttgacagacaagaagcgagagaggatgcaaatcaagagaaatacgaacagtgttcctgaaaccgctccagctgcaatccctgagaccaaaagaaacgcagagttcctcacctgtaatatacccacatcaaatgcctcaaataacatggtaaccacagaaaaagtggagaatgggcaggaacctgtcataaagttagaaaacaggcaagaggccagaccagaaccagcaagactgaaaccacctgttcattacaatggcccctcaaaagcagggtatgttgactttgaaaatggccagtgggccacagatgacatcccagatgacttgaatagtatccgcgcagcaccaggtgagtttcgagccatcatggagatgccctccttctacagtcatggcttgccacggtgttcaccctacaagaaactgacagagtgccagctgaagaaccccatcagcgggctgttagaatatgcccagttcgctagtcaaacctgtgagttcaacatgatagagcagagtggaccaccccatgaacctcgatttaaattccaggttgtcatcaatggccgagagtttcccccagctgaagctggaagcaagaaagtggccaagcaggatgcagctatgaaagccatgacaattctgctagaggaagccaaagccaaggacagtggaaaatcagaagaatcatcccactattccacagagaaagaatcagagaagactgcagagtcccagacccccaccccttcagccacatccttcttttctgggaagagccccgtcaccacactgcttgagtgtatgcacaaattggggaactcctgcgaattccgtctcctgtccaaagaaggccctgcccatgaacccaagttccaatactgtgttgcagtgggagcccaaactttccccagtgtgagtgctcccagcaagaaagtggcaaagcagatggccgcagaggaagccatgaaggccctgcatggggaggcgaccaactccatggcttctgataaccagcctgaaggtatgatctcagagtcacttgataacttggaatccatgatgcccaacaaggtcaggaagattggcgagctcgtgagatacctgaacaccaaccctgtgggtggccttttggagtacgcccgctcccatggctttgctgctgaattcaagttggtcgaccagtccggacctcctcacgagcccaagttcgtttaccaagcaaaagttgggggtcgctggttcccagccgtctgcgcacacagcaagaagcaaggcaagcaggaagcagcagatgcggctctccgtgtcttgattggggagaacgagaaggcagaacgcatgggtttcacagaggtaaccccagtgacaggggccagtctcagaagaactatgctcctcctctcaaggtccccagaagcacagccaaagacactccctctcactggcagcaccttccatgaccagatagccatgctgagccaccggtgcttcaacactctgactaacagcttccagccctccttgctcggccgcaagattctggccgccatcattatgaaaaaagactctgaggacatgggtgtcgtcgtcagcttgggaacagggaatcgctgtgtgaaaggagattctctcagcctaaaaggagaaactgtcaatgactgccatgcagaaataatctcccggagaggcttcatcaggtttctctacagtgagttaatgaaatacaactcccagactgcgaaggatagtatatttgaacctgctaagggaggagaaaagctccaaataaaaaagactgtgtcattccatctgtatatcagcactgctccgtgtggagatggcgccctctttgacaagtcctgcagcgaccgtgctatggaaagcacagaatcccgccactaccctgtcttcgagaatcccaaacaaggaaagctccgcaccaaggtggagaacggagaaggcacaatccctgtggaatccagtgacattgtgcctacgtgggatggcattcggctcggggagagactccgtaccatgtcctgtagtgacaaaatcctacgctggaacgtgctgggcctgcaaggggcactgttgacccacttcctgcagcccatttatctcaaatctgtcacattgggttaccttttcagccaagggcatctgacccgtgctatttgctgtcgtgtgacaagagatgggagtgcatttgaggatggactacgacatccctttattgtcaaccaccccaaggttggcagagtcagcatatatgattccaaaaggcaatccgggaagactaaggagacaagcgtcaactggtgtctggctgatggctatgacctggagatcctggacggtaccagaggcactgtggatgggccacggaatgaattgtcccgggtctccaaaaagaacatttttcttctatttaagaagctctgctccttccgttaccgcagggatctactgagactctcctatggtgaggccaagaaagctgcccgtgactacgagacggccaagaactacttcaaaaaaggcctgaaggatatgggctatgggaactggattagcaaaccccaggaggaaaagaacttttatctctgcccagtatag

SEQ ID NO: 6 - protein, 931 aa, Homo sapiens
MAEIKEKICDYLFNVSDSSALNLAKNIGLTKARDINAVLIDMERQGDVYRQGTTPPIWHLTDKKRERMQIKRNTNSVPETAPAAIPETKRNAEFLTCNIPTSNASNNMVTTEKVENGQEPVIKLENRQEARPEPARLKPPVHYNGPSKAGYVDFENGQWATDDIPDDLNSIRAAPGEFRAIMEMPSFYSHGLPRCSPYKKLTECQLKNPISGLLEYAQFASQTCEFNMIEQSGPPHEPRFKFQVVINGREFPPAEAGSKKVAKQDAAMKAMTILLEEAKAKDSGKSEESSHYSTEKESEKTAESQTPTPSATSFFSGKSPVTTLLECMHKLGNSCEFRLLSKEGPAHEPKFQYCVAVGAQTFPSVSAPSKKVAKQMAAEEAMKALHGEATNSMASDNQPEGMISESLDNLESMMPNKVRKIGELVRYLNTNPVGGLLEYARSHGFAAEFKLVDQSGPPHEPKFVYQAKVGGRWFPAVCAHSKKQGKQEAADAALRVLIGENEKAERMGFTEVTPVTGASLRRTMLLLSRSPEAQPKTLPLTGSTFHDQIAMLSHRCFNTLTNSFQPSLLGRKILAAIIMKKDSEDMGVVVSLGTGNRCVKGDSLSLKGETVNDCHAEIISRRGFIRFLYSELMKYNSQTAKDSIFEPAKGGEKLQIKKTVSFHLYISTAPCGDGALFDKSCSDRAMESTESRHYPVFENPKQGKLRTKVENGEGTIPVESSDIVPTWDGIRLGERLRTMSCSDKILRWNVLGLQGALLTHFLQPIYLKSVTLGYLFSQGHLTRAICCRVTRDGSAFEDGLRHPFIVNHPKVGRVSIYDSKRQSGKTKETSVNWCLADGYDLEILDGTRGTVDGPRNELSRVSKKNIFLLFKKLCSFRYRRDLLRLSYGEAKKAARDYETAKNYFKKGLKDMGYGNWISKPQEEKNFYLCPV

SEQ ID NO: 7 - DNA, 459 bp, Artificial Sequence
  N-terminal ADAR2 sequence for split ADAR
  CDS (1)..(459)
cagctgcacctgccccaggttctcgcagacgccgtatcccgccttgtactgggcaagtttggtgatcttactgacaatttttcatctcctcatgcgaggcggaaagtactcgcaggcgtcgtcatgacgaccggaactgacgtgaaagacgccaaagtcatctctgtctccacgggcacaaagtgcataaacggggagtacatgagcgaccgggggctggcactgaatgattgtcacgctgaaataatatctaggcgatctctgcttagatttctctacactcaactcgaattgtaccttaacaacaaagatgaccagaaacgcagtatatttcagaaatcagaacgcggcggatttcgacttaaggaaaacgttcagttccacttgtatatcagcacatccccttgcggtgacgcccgaatcttttccccgcacgagccgatattggaggagcccgcg

SEQ ID NO: 8 - protein, 153 aa, Artificial Sequence
  Synthetic Construct
QLHLPQVLADAVSRLVLGKFGDLTDNFSSPHARRKVLAGVVMTTGTDVKDAKVISVSTGTKCINGEYMSDRGLALNDCHAEIISRRSLLRFLYTQLELYLNNKDDQKRSIFQKSERGGFRLKENVQFHLYISTSPCGDARIFSPHEPILEEPA

SEQ ID NO: 9 - DNA, 702 bp, Artificial Sequence
  C-terminal ADAR2 sequence for split ADAR
  CDS (1)..(702)
atggacagacatcctaataggaaggctagaggccaacttcggacgaagattgaaagtggcgagggtactatcccggtgcggtccaacgctagtattcaaacgtgggacggagtccttcaaggtgaacggctgttgacaatgagctgctcagacaaaatcgcgcgctggaatgtagtgggaatccaaggcagcctcttgagcatattcgtagaacccatatatttctcatccattattttgggctctctgtatcatggtgaccatctgtcaagggctatgtaccaacgaatttctaatatcgaggatcttcctccactctatacactcaataagcctctcttgtccgggatatcaaacgctgaggcccgccagccagggaaagctcctaacttcagtgttaactggaccgttggtgattctgcgatagaggtcatcaacgccacgacaggtaaggatgagctcggtagagcctcacgcctgtgtaaacacgcgttgtattgtagatggatgagagtacatgggaaggtcccatctcacttgctccgaagcaagatcactaagcctaatgtgtatcatgagtcaaaactcgcggctaaagaataccaggcagccaaagctcgactttttacagcttttattaaggcagggctcggggcatgggtcgagaagccgaccgagcaggaccaattctctctgacgccc

SEQ ID NO: 10 - protein, 234 aa, Artificial Sequence
  Synthetic Construct
MDRHPNRKARGQLRTKIESGEGTIPVRSNASIQTWDGVLQGERLLTMSCSDKIARWNVVGIQGSLLSIFVEPIYFSSIILGSLYHGDHLSRAMYQRISNIEDLPPLYTLNKPLLSGISNAEARQPGKAPNFSVNWTVGDSAIEVINATTGKDELGRASRLCKHALYCRWMRVHGKVPSHLLRSKITKPNVYHESKLAAKEYQAAKARLFTAFIKAGLGAWVEKPTEQDQFSLTP

SEQ ID NO: 11 - DNA, 351 bp, Artificial Sequence
  Coat protein coding sequence
  CDS (1)..(351)
atggcgtccaatttcactcagtttgtgctggttgacaacggcgggaccggggacgttacggtagccccctcaaactttgccaacggtatagcggagtggataagcagcaattctaggagtcaagcatacaaagttacatgcagcgtgcgccaatctagcgctcagaatcgcaagtacaccattaaagtagaggtccccaagggagcctggagaagctatcttaacatggagttgaccataccaatcttcgctaccaactctgactgtgaactcattgtgaaagccatgcaaggtctgctcaaggatggtaacccaattccgtccgctatcgctgccaactctgggatttac

SEQ ID NO: 12 - protein, 117 aa, Artificial Sequence
  Synthetic Construct
MASNFTQFVLVDNGGTGDVTVAPSNFANGIAEWISSNSRSQAYKVTCSVRQSSAQNRKYTIKVEVPKGAWRSYLNMELTIPIFATNSDCELIVKAMQGLLKDGNPIPSAIAANSGIY

SEQ ID NO: 13 - RNA, 18 nt, Artificial Sequence
  RNA Hairpin that interacts with MS2 coat protein
acaugaggauuacccaug

SEQ ID NO: 14 - RNA, 18 nt, Artificial Sequence
  Hairpin loop that binds to MS2 protein
acaugaggaucacccaug

SEQ ID NO: 15 - DNA, 63 bp, Artificial Sequence
  LambdaN peptide
  CDS (1)..(63)
aatgcgaggacacggcgacgagaacgacgcgctgaaaagcaagcgcaatggaaagctgcaaac

SEQ ID NO: 16 - protein, 21 aa, Artificial Sequence
  Synthetic Construct
NARTRRRERRAEKQAQWKAAN

SEQ ID NO: 17 - DNA, 63 bp, Artificial Sequence
  LambdaN peptide
  CDS (1)..(63)
aatgctcggactcggagacgcgagcggagagcggagaagcaggcacaatggaaagccgctaat

SEQ ID NO: 18 - protein, 21 aa, Artificial Sequence
  Synthetic Construct
NARTRRRERRAEKQAQWKAAN

SEQ ID NO: 19 - DNA, 63 bp, Artificial Sequence
  LambdaN peptide
  CDS (1)..(63)
aacgcgagaacccgccgacgagagcgcagagcggagaaacaagcacagtggaaggcggccaac

SEQ ID NO: 20 - protein, 21 aa, Artificial Sequence
  Synthetic Construct
NARTRRRERRAEKQAQWKAAN

SEQ ID NO: 21 - DNA, 63 bp, Artificial Sequence
  LambdaN peptide
  CDS (1)..(63)
aatgcccgaacccgacgaagggaaagacgggctgagaaacaggctcaatggaaagcggctaat

SEQ ID NO: 22 - protein, 21 aa, Artificial Sequence
  Synthetic Construct
NARTRRRERRAEKQAQWKAAN

SEQ ID NO: 23 - RNA, 15 nt, Artificial Sequence
  nutL BoxB
gcccugaagaagggc

SEQ ID NO: 24 - RNA, 15 nt, Artificial Sequence
  nutR BoxB
gcccugaaaaagggc

SEQ ID NO: 25 - protein, 127 aa, Artificial Sequence
  PP7 peptide
SKTIVLSVGEATRTLTEIQSTADRQIFEEKVGPLVGRLRLTASLRQNGAKTAYRVNLKLDQADVVDCSTSVCGELPKVRYTQVWSHDVTIVANSTEASRKSLYDLTKSLVVQATSEDLVVNLVPLGR

SEQ ID NO: 26 - RNA, 25 nt, Artificial Sequence
  PP7 targeted hairpin
uaaggaguuuauauggaaacccuua

SEQ ID NO: 27 - protein, 14 aa, Artificial Sequence
  BIV Tat peptide domain
RRRGTRGKGRRIRR

SEQ ID NO: 28 - RNA, 28 nt, Artificial Sequencd
  TAR element
ggcucguguagcucauuagcuccgagcc

SEQ ID NO: 29 - protein, 701 aa, Artificial Sequence
  ADAR polypeptide sequence
MDIEDEENMSSSSTDVKENRNLDNVSPKDGSTPGPGEGSQLSNGGGGGPGRKRPLEEGSNGHSKYRLKKRRKTPGPVLPKNALMQLNEIKPGLQYTLLSQTGPVHAPLFVMSVEVNGQVFEGSGPTKKKAKLHAAEKALRSFVQFPNASEAHLAMGRTLSVNTDFTSDQADFPDTLFNGFETPDKAEPPFYVGSNGDDSFSSSGDLSLSASPVPASLAQPPLPVLPPFPPPSGKNPVMILNELRPGLKYDFLSESGESHAKSFVMSVVVDGQFFEGSGRNKKLAKARAAQSALAAIFNLHLDQTPSRQPIPSEGLQLHLPQVLADAVSRLVLGKFGDLTDNFSSPHARRKVLAGVVMTTGTDVKDAKVISVSTGTKCINGEYMSDRGLALNDCHAEIISRRSLLRFLYTQLELYLNNKDDQKRSIFQKSERGGFRLKENVQFHLYISTSPCGDARIFSPHEPILEEPADRHPNRKARGQLRTKIESGEGTIPVRSFASIQTWDGVLQGERLLTMSCSDKIARWNVVGIQGSLLSIFVEPIYFSSIILGSLYHGDHLSRAMYQRISNIEDLPPLYTLNKPLLSGISNAEARQPGKAPNFSVNWTVGDSAIEVINATTGKDELGRASRLCKHALYCRWMRVHGKVPSHLLRSKITKPNVYHESKLAAKEYQAAKARLFTAFIKAGLGAWVEKPTEQDQFSLTP

SEQ ID NO: 30 - protein, 701 aa, Artificial Sequence
  ADAR Polypeptide sequence
MDIEDEENMSSSSTDVKENRNLDNVSPKDGSTPGPGEGSQLSNGGGGGPGRKRPLEEGSNGHSKYRLKKRRKTPGPVLPKNALMQLNEIKPGLQYTLLSQTGPVHAPLFVMSVEVNGQVFEGSGPTKKKAKLHAAEKALRSFVQFPNASEAHLAMGRTLSVNTDFTSDQADFPDTLFNGFETPDKAEPPFYVGSNGDDSFSSSGDLSLSASPVPASLAQPPLPVLPPFPPPSGKNPVMILNELRPGLKYDFLSESGESHAKSFVMSVVVDGQFFEGSGRNKKLAKARAAQSALAAIFNLHLDQTPSRQPIPSEGLQLHLPQVLADAVSRLVLGKFGDLTDNFSSPHARRKVLAGVVMTTGTDVKDAKVISVSTGTKCINGEYMSDRGLALNDCHAEIISRRSLLRFLYTQLELYLNNKDDQKRSIFQKSERGGFRLKENVQFHLYISTSPCGDARIFSPHEPILEEPADRHPNRKARGQLRTKIESGQGTIPVRSFASIQTWDGVLQGERLLTMSCSDKIARWNVVGIQGSLLSIFVEPIYFSSIILGSLYHGDHLSRAMYQRISNIEDLPPLYTLNKPLLSGISNAEARQPGKAPNFSVNWTVGDSAIEVINATTGKDELGRASRLCKHALYCRWMRVHGKVPSHLLRSKITKPNVYHESKLAAKEYQAAKARLFTAFIKAGLGAWVEKPTEQDQFSLTP

SEQ ID NO: 31 - protein, 701 aa, Artificial Sequence
  ADAR Polypeptide Sequence
MDIEDEENMSSSSTDVKENRNLDNVSPKDGSTPGPGEGSQLSNGGGGGPGRKRPLEEGSNGHSKYRLKKRRKTPGPVLPKNALMQLNEIKPGLQYTLLSQTGPVHAPLFVMSVEVNGQVFEGSGPTKKKAKLHAAEKALRSFVQFPNASEAHLAMGRTLSVNTDFTSDQADFPDTLFNGFETPDKAEPPFYVGSNGDDSFSSSGDLSLSASPVPASLAQPPLPVLPPFPPPSGKNPVMILNELRPGLKYDFLSESGESHAKSFVMSVVVDGQFFEGSGRNKKLAKARAAQSALAAIFNLHLDQTPSRQPIPSEGLQLHLPQVLADAVSRLVLGKFGDLTDNFSSPHARRKVLAGVVMTTGTDVKDAKVISVSTGTKCINGEYMSDRGLALNDCHAEIISRRSLLRFLYTQLELYLNNKDDQKRSIFQKSERGGFRLKENVQFHLYISTSPCGDARIFSPHEPILEEPADRHPNRKARGQLRTKIESGHGTIPVRSFASIQTWDGVLQGERLLTMSCSDKIARWNVVGIQGSLLSIFVEPIYFSSIILGSLYHGDHLSRAMYQRISNIEDLPPLYTLNKPLLSGISNAEARQPGKAPNFSVNWTVGDSAIEVINATTGKDELGRASRLCKHALYCRWMRVHGKVPSHLLRSKITKPNVYHESKLAAKEYQAAKARLFTAFIKAGLGAWVEKPTEQDQFSLTP

SEQ ID NO: 32 - protein, 701 aa, Artificial Sequence
  ADAR Polypeptide Sequence
MDIEDEENMSSSSTDVKENRNLDNVSPKDGSTPGPGEGSQLSNGGGGGPGRKRPLEEGSNGHSKYRLKKRRKTPGPVLPKNALMQLNEIKPGLQYTLLSQTGPVHAPLFVMSVEVNGQVFEGSGPTKKKAKLHAAEKALRSFVQFPNASEAHLAMGRTLSVNTDFTSDQADFPDTLFNGFETPDKAEPPFYVGSNGDDSFSSSGDLSLSASPVPASLAQPPLPVLPPFPPPSGKNPVMILNELRPGLKYDFLSESGESHAKSFVMSVVVDGQFFEGSGRNKKLAKARAAQSALAAIFNLHLDQTPSRQPIPSEGLQLHLPQVLADAVSRLVLGKFGDLTDNFSSPHARRKVLAGVVMTTGTDVKDAKVISVSTGTKCINGEYMSDRGLALNDCHAEIISRRSLLRFLYTQLELYLNNKDDQKRSIFQKSERGGFRLKENVQFHLYISTSPCGDARIFSPHEPILEEPADRHPNRKARGQLRTKIESGRGTIPVRSFASIQTWDGVLQGERLLTMSCSDKIARWNVVGIQGSLLSIFVEPIYFSSIILGSLYHGDHLSRAMYQRISNIEDLPPLYTLNKPLLSGISNAEARQPGKAPNFSVNWTVGDSAIEVINATTGKDELGRASRLCKHALYCRWMRVHGKVPSHLLRSKITKPNVYHESKLAAKEYQAAKARLFTAFIKAGLGAWVEKPTEQDQFSLTP

SEQ ID NO: 33 - protein, 701 aa, Artificial Sequence
  ADAR Polypeptide Sequence
MDIEDEENMSSSSTDVKENRNLDNVSPKDGSTPGPGEGSQLSNGGGGGPGRKRPLEEGSNGHSKYRLKKRRKTPGPVLPKNALMQLNEIKPGLQYTLLSQTGPVHAPLFVMSVEVNGQVFEGSGPTKKKAKLHAAEKALRSFVQFPNASEAHLAMGRTLSVNTDFTSDQADFPDTLFNGFETPDKAEPPFYVGSNGDDSFSSSGDLSLSASPVPASLAQPPLPVLPPFPPPSGKNPVMILNELRPGLKYDFLSESGESHAKSFVMSVVVDGQFFEGSGRNKKLAKARAAQSALAAIFNLHLDQTPSRQPIPSEGLQLHLPQVLADAVSRLVLGKFGDLTDNFSSPHARRKVLAGVVMTTGTDVKDAKVISVSTGTKCINGEYMSDRGLALNDCHAEIISRRSLLRFLYTQLELYLNNKDDQKRSIFQKSERGGFRLKENVQFHLYISTSPCGDARIFSPHEPILEEPADRHPNRKARGQLRTKIESGKGTIPVRSFASIQTWDGVLQGERLLTMSCSDKIARWNVVGIQGSLLSIFVEPIYFSSIILGSLYHGDHLSRAMYQRISNIEDLPPLYTLNKPLLSGISNAEARQPGKAPNFSVNWTVGDSAIEVINATTGKDELGRASRLCKHALYCRWMRVHGKVPSHLLRSKITKPNVYHESKLAAKEYQAAKARLFTAFIKAGLGAWVEKPTEQDQFSLTP

SEQ ID NO: 34 - protein, 701 aa, Artificial Sequence
  ADAR Polypeptide Sequence
MDIEDEENMSSSSTDVKENRNLDNVSPKDGSTPGPGEGSQLSNGGGGGPGRKRPLEEGSNGHSKYRLKKRRKTPGPVLPKNALMQLNEIKPGLQYTLLSQTGPVHAPLFVMSVEVNGQVFEGSGPTKKKAKLHAAEKALRSFVQFPNASEAHLAMGRTLSVNTDFTSDQADFPDTLFNGFETPDKAEPPFYVGSNGDDSFSSSGDLSLSASPVPASLAQPPLPVLPPFPPPSGKNPVMILNELRPGLKYDFLSESGESHAKSFVMSVVVDGQFFEGSGRNKKLAKARAAQSALAAIFNLHLDQTPSRQPIPSEGLQLHLPQVLADAVSRLVLGKFGDLTDNFSSPHARRKVLAGVVMTTGTDVKDAKVISVSTGTKCINGEYMSDRGLALNDCHAEIISRRSLLRFLYTQLELYLNNKDDQKRSIFQKSERGGFRLKENVQFHLYISTSPCGDARIFSPHEPILEEPADRHPNRKARGQLRTKIESGNGTIPVRSFASIQTWDGVLQGERLLTMSCSDKIARWNVVGIQGSLLSIFVEPIYFSSIILGSLYHGDHLSRAMYQRISNIEDLPPLYTLNKPLLSGISNAEARQPGKAPNFSVNWTVGDSAIEVINATTGKDELGRASRLCKHALYCRWMRVHGKVPSHLLRSKITKPNVYHESKLAAKEYQAAKARLFTAFIKAGLGAWVEKPTEQDQFSLTP

SEQ ID NO: 35 - protein, 701 aa, Artificial Sequence
  ADAR Polypeptide Sequence
MDIEDEENMSSSSTDVKENRNLDNVSPKDGSTPGPGEGSQLSNGGGGGPGRKRPLEEGSNGHSKYRLKKRRKTPGPVLPKNALMQLNEIKPGLQYTLLSQTGPVHAPLFVMSVEVNGQVFEGSGPTKKKAKLHAAEKALRSFVQFPNASEAHLAMGRTLSVNTDFTSDQADFPDTLFNGFETPDKAEPPFYVGSNGDDSFSSSGDLSLSASPVPASLAQPPLPVLPPFPPPSGKNPVMILNELRPGLKYDFLSESGESHAKSFVMSVVVDGQFFEGSGRNKKLAKARAAQSALAAIFNLHLDQTPSRQPIPSEGLQLHLPQVLADAVSRLVLGKFGDLTDNFSSPHARRKVLAGVVMTTGTDVKDAKVISVSTGTKCINGEYMSDRGLALNDCHAEIISRRSLLRFLYTQLELYLNNKDDQKRSIFQKSERGGFRLKENVQFHLYISTSPCGDARIFSPHEPILEEPADRHPNRKARGQLRTKIESGAGTIPVRSFASIQTWDGVLQGERLLTMSCSDKIARWNVVGIQGSLLSIFVEPIYFSSIILGSLYHGDHLSRAMYQRISNIEDLPPLYTLNKPLLSGISNAEARQPGKAPNFSVNWTVGDSAIEVINATTGKDELGRASRLCKHALYCRWMRVHGKVPSHLLRSKITKPNVYHESKLAAKEYQAAKARLFTAFIKAGLGAWVEKPTEQDQFSLTP

SEQ ID NO: 36 - protein, 701 aa, Artificial Sequence
  ADAR Polypeptide Sequence
MDIEDEENMSSSSTDVKENRNLDNVSPKDGSTPGPGEGSQLSNGGGGGPGRKRPLEEGSNGHSKYRLKKRRKTPGPVLPKNALMQLNEIKPGLQYTLLSQTGPVHAPLFVMSVEVNGQVFEGSGPTKKKAKLHAAEKALRSFVQFPNASEAHLAMGRTLSVNTDFTSDQADFPDTLFNGFETPDKAEPPFYVGSNGDDSFSSSGDLSLSASPVPASLAQPPLPVLPPFPPPSGKNPVMILNELRPGLKYDFLSESGESHAKSFVMSVVVDGQFFEGSGRNKKLAKARAAQSALAAIFNLHLDQTPSRQPIPSEGLQLHLPQVLADAVSRLVLGKFGDLTDNFSSPHARRKVLAGVVMTTGTDVKDAKVISVSTGTKCINGEYMSDRGLALNDCHAEIISRRSLLRFLYTQLELYLNNKDDQKRSIFQKSERGGFRLKENVQFHLYISTSPCGDARIFSPHEPILEEPADRHPNRKARGQLRTKIESGMGTIPVRSFASIQTWDGVLQGERLLTMSCSDKIARWNVVGIQGSLLSIFVEPIYFSSIILGSLYHGDHLSRAMYQRISNIEDLPPLYTLNKPLLSGISNAEARQPGKAPNFSVNWTVGDSAIEVINATTGKDELGRASRLCKHALYCRWMRVHGKVPSHLLRSKITKPNVYHESKLAAKEYQAAKARLFTAFIKAGLGAWVEKPTEQDQFSLTP

SEQ ID NO: 37 - protein, 701 aa, Artificial Sequence
  ADAR Polypeptide Sequence
MDIEDEENMSSSSTDVKENRNLDNVSPKDGSTPGPGEGSQLSNGGGGGPGRKRPLEEGSNGHSKYRLKKRRKTPGPVLPKNALMQLNEIKPGLQYTLLSQTGPVHAPLFVMSVEVNGQVFEGSGPTKKKAKLHAAEKALRSFVQFPNASEAHLAMGRTLSVNTDFTSDQADFPDTLFNGFETPDKAEPPFYVGSNGDDSFSSSGDLSLSASPVPASLAQPPLPVLPPFPPPSGKNPVMILNELRPGLKYDFLSESGESHAKSFVMSVVVDGQFFEGSGRNKKLAKARAAQSALAAIFNLHLDQTPSRQPIPSEGLQLHLPQVLADAVSRLVLGKFGDLTDNFSSPHARRKVLAGVVMTTGTDVKDAKVISVSTGTKCINGEYMSDRGLALNDCHAEIISRRSLLRFLYTQLELYLNNKDDQKRSIFQKSERGGFRLKENVQFHLYISTSPCGDARIFSPHEPILEEPADRHPNRKARGQLRTKIESGSGTIPVRSFASIQTWDGVLQGERLLTMSCSDKIARWNVVGIQGSLLSIFVEPIYFSSIILGSLYHGDHLSRAMYQRISNIEDLPPLYTLNKPLLSGISNAEARQPGKAPNFSVNWTVGDSAIEVINATTGKDELGRASRLCKHALYCRWMRVHGKVPSHLLRSKITKPNVYHESKLAAKEYQAAKARLFTAFIKAGLGAWVEKPTEQDQFSLTP

SEQ ID NO: 38 - protein, 701 aa, Artificial Sequence
  ADAR Polypeptide Sequence
MDIEDEENMSSSSTDVKENRNLDNVSPKDGSTPGPGEGSQLSNGGGGGPGRKRPLEEGSNGHSKYRLKKRRKTPGPVLPKNALMQLNEIKPGLQYTLLSQTGPVHAPLFVMSVEVNGQVFEGSGPTKKKAKLHAAEKALRSFVQFPNASEAHLAMGRTLSVNTDFTSDQADFPDTLFNGFETPDKAEPPFYVGSNGDDSFSSSGDLSLSASPVPASLAQPPLPVLPPFPPPSGKNPVMILNELRPGLKYDFLSESGESHAKSFVMSVVVDGQFFEGSGRNKKLAKARAAQSALAAIFNLHLDQTPSRQPIPSEGLQLHLPQVLADAVSRLVLGKFGDLTDNFSSPHARRKVLAGVVMTTGTDVKDAKVISVSTGTKCINGEYMSDRGLALNDCHAEIISRRSLLRFLYTQLELYLNNKDDQKRSIFQKSERGGFRLKENVQFHLYISTSPCGDARIFSPHEPILEEPADRHPNRKARGQLRTKIESGFGTIPVRSFASIQTWDGVLQGERLLTMSCSDKIARWNVVGIQGSLLSIFVEPIYFSSIILGSLYHGDHLSRAMYQRISNIEDLPPLYTLNKPLLSGISNAEARQPGKAPNFSVNWTVGDSAIEVINATTGKDELGRASRLCKHALYCRWMRVHGKVPSHLLRSKITKPNVYHESKLAAKEYQAAKARLFTAFIKAGLGAWVEKPTEQDQFSLTP

SEQ ID NO: 39 - protein, 701 aa, Artificial Sequence
  ADAR Polypeptide Sequence
MDIEDEENMSSSSTDVKENRNLDNVSPKDGSTPGPGEGSQLSNGGGGGPGRKRPLEEGSNGHSKYRLKKRRKTPGPVLPKNALMQLNEIKPGLQYTLLSQTGPVHAPLFVMSVEVNGQVFEGSGPTKKKAKLHAAEKALRSFVQFPNASEAHLAMGRTLSVNTDFTSDQADFPDTLFNGFETPDKAEPPFYVGSNGDDSFSSSGDLSLSASPVPASLAQPPLPVLPPFPPPSGKNPVMILNELRPGLKYDFLSESGESHAKSFVMSVVVDGQFFEGSGRNKKLAKARAAQSALAAIFNLHLDQTPSRQPIPSEGLQLHLPQVLADAVSRLVLGKFGDLTDNFSSPHARRKVLAGVVMTTGTDVKDAKVISVSTGTKCINGEYMSDRGLALNDCHAEIISRRSLLRFLYTQLELYLNNKDDQKRSIFQKSERGGFRLKENVQFHLYISTSPCGDARIFSPHEPILEEPADRHPNRKARGQLRTKIESGLGTIPVRSFASIQTWDGVLQGERLLTMSCSDKIARWNVVGIQGSLLSIFVEPIYFSSIILGSLYHGDHLSRAMYQRISNIEDLPPLYTLNKPLLSGISNAEARQPGKAPNFSVNWTVGDSAIEVINATTGKDELGRASRLCKHALYCRWMRVHGKVPSHLLRSKITKPNVYHESKLAAKEYQAAKARLFTAFIKAGLGAWVEKPTEQDQFSLTP

SEQ ID NO: 40 - protein, 701 aa, Artificial Sequence
  ADAR Polypeptide Sequence
MDIEDEENMSSSSTDVKENRNLDNVSPKDGSTPGPGEGSQLSNGGGGGPGRKRPLEEGSNGHSKYRLKKRRKTPGPVLPKNALMQLNEIKPGLQYTLLSQTGPVHAPLFVMSVEVNGQVFEGSGPTKKKAKLHAAEKALRSFVQFPNASEAHLAMGRTLSVNTDFTSDQADFPDTLFNGFETPDKAEPPFYVGSNGDDSFSSSGDLSLSASPVPASLAQPPLPVLPPFPPPSGKNPVMILNELRPGLKYDFLSESGESHAKSFVMSVVVDGQFFEGSGRNKKLAKARAAQSALAAIFNLHLDQTPSRQPIPSEGLQLHLPQVLADAVSRLVLGKFGDLTDNFSSPHARRKVLAGVVMTTGTDVKDAKVISVSTGTKCINGEYMSDRGLALNDCHAEIISRRSLLRFLYTQLELYLNNKDDQKRSIFQKSERGGFRLKENVQFHLYISTSPCGDARIFSPHEPILEEPADRHPNRKARGQLRTKIESGWGTIPVRSFASIQTWDGVLQGERLLTMSCSDKIARWNVVGIQGSLLSIFVEPIYFSSIILGSLYHGDHLSRAMYQRISNIEDLPPLYTLNKPLLSGISNAEARQPGKAPNFSVNWTVGDSAIEVINATTGKDELGRASRLCKHALYCRWMRVHGKVPSHLLRSKITKPNVYHESKLAAKEYQAAKARLFTAFIKAGLGAWVEKPTEQDQFSLTP

SEQ ID NO: 41 - protein, 701 aa, Artificial Sequence
  ADAR Polypeptide Sequence
MDIEDEENMSSSSTDVKENRNLDNVSPKDGSTPGPGEGSQLSNGGGGGPGRKRPLEEGSNGHSKYRLKKRRKTPGPVLPKNALMQLNEIKPGLQYTLLSQTGPVHAPLFVMSVEVNGQVFEGSGPTKKKAKLHAAEKALRSFVQFPNASEAHLAMGRTLSVNTDFTSDQADFPDTLFNGFETPDKAEPPFYVGSNGDDSFSSSGDLSLSASPVPASLAQPPLPVLPPFPPPSGKNPVMILNELRPGLKYDFLSESGESHAKSFVMSVVVDGQFFEGSGRNKKLAKARAAQSALAAIFNLHLDQTPSRQPIPSEGLQLHLPQVLADAVSRLVLGKFGDLTDNFSSPHARRKVLAGVVMTTGTDVKDAKVISVSTGTKCINGEYMSDRGLALNDCHAEIISRRSLLRFLYTQLELYLNNKDDQKRSIFQKSERGGFRLKENVQFHLYISTSPCGDARIFSPHEPILEEPADRHPNRKARGQLRTKIESGEGTIPVRSYASIQTWDGVLQGERLLTMSCSDKIARWNVVGIQGSLLSIFVEPIYFSSIILGSLYHGDHLSRAMYQRISNIEDLPPLYTLNKPLLSGISNAEARQPGKAPNFSVNWTVGDSAIEVINATTGKDELGRASRLCKHALYCRWMRVHGKVPSHLLRSKITKPNVYHESKLAAKEYQAAKARLFTAFIKAGLGAWVEKPTEQDQFSLTP

SEQ ID NO: 42 - protein, 701 aa, Artificial Sequence
  ADAR Polypeptide Sequence
MDIEDEENMSSSSTDVKENRNLDNVSPKDGSTPGPGEGSQLSNGGGGGPGRKRPLEEGSNGHSKYRLKKRRKTPGPVLPKNALMQLNEIKPGLQYTLLSQTGPVHAPLFVMSVEVNGQVFEGSGPTKKKAKLHAAEKALRSFVQFPNASEAHLAMGRTLSVNTDFTSDQADFPDTLFNGFETPDKAEPPFYVGSNGDDSFSSSGDLSLSASPVPASLAQPPLPVLPPFPPPSGKNPVMILNELRPGLKYDFLSESGESHAKSFVMSVVVDGQFFEGSGRNKKLAKARAAQSALAAIFNLHLDQTPSRQPIPSEGLQLHLPQVLADAVSRLVLGKFGDLTDNFSSPHARRKVLAGVVMTTGTDVKDAKVISVSTGTKCINGEYMSDRGLALNDCHAEIISRRSLLRFLYTQLELYLNNKDDQKRSIFQKSERGGFRLKENVQFHLYISTSPCGDARIFSPHEPILEEPADRHPNRKARGQLRTKIESGQGTIPVRSYASIQTWDGVLQGERLLTMSCSDKIARWNVVGIQGSLLSIFVEPIYFSSIILGSLYHGDHLSRAMYQRISNIEDLPPLYTLNKPLLSGISNAEARQPGKAPNFSVNWTVGDSAIEVINATTGKDELGRASRLCKHALYCRWMRVHGKVPSHLLRSKITKPNVYHESKLAAKEYQAAKARLFTAFIKAGLGAWVEKPTEQDQFSLTP

SEQ ID NO: 43 - protein, 701 aa, Artificial Sequence
  ADAR Polypeptide Sequence
MDIEDEENMSSSSTDVKENRNLDNVSPKDGSTPGPGEGSQLSNGGGGGPGRKRPLEEGSNGHSKYRLKKRRKTPGPVLPKNALMQLNEIKPGLQYTLLSQTGPVHAPLFVMSVEVNGQVFEGSGPTKKKAKLHAAEKALRSFVQFPNASEAHLAMGRTLSVNTDFTSDQADFPDTLFNGFETPDKAEPPFYVGSNGDDSFSSSGDLSLSASPVPASLAQPPLPVLPPFPPPSGKNPVMILNELRPGLKYDFLSESGESHAKSFVMSVVVDGQFFEGSGRNKKLAKARAAQSALAAIFNLHLDQTPSRQPIPSEGLQLHLPQVLADAVSRLVLGKFGDLTDNFSSPHARRKVLAGVVMTTGTDVKDAKVISVSTGTKCINGEYMSDRGLALNDCHAEIISRRSLLRFLYTQLELYLNNKDDQKRSIFQKSERGGFRLKENVQFHLYISTSPCGDARIFSPHEPILEEPADRHPNRKARGQLRTKIESGHGTIPVRSYASIQTWDGVLQGERLLTMSCSDKIARWNVVGIQGSLLSIFVEPIYFSSIILGSLYHGDHLSRAMYQRISNIEDLPPLYTLNKPLLSGISNAEARQPGKAPNFSVNWTVGDSAIEVINATTGKDELGRASRLCKHALYCRWMRVHGKVPSHLLRSKITKPNVYHESKLAAKEYQAAKARLFTAFIKAGLGAWVEKPTEQDQFSLTP

SEQ ID NO: 44 - protein, 701 aa, Artificial Sequence
  ADAR Polypeptide Sequence
MDIEDEENMSSSSTDVKENRNLDNVSPKDGSTPGPGEGSQLSNGGGGGPGRKRPLEEGSNGHSKYRLKKRRKTPGPVLPKNALMQLNEIKPGLQYTLLSQTGPVHAPLFVMSVEVNGQVFEGSGPTKKKAKLHAAEKALRSFVQFPNASEAHLAMGRTLSVNTDFTSDQADFPDTLFNGFETPDKAEPPFYVGSNGDDSFSSSGDLSLSASPVPASLAQPPLPVLPPFPPPSGKNPVMILNELRPGLKYDFLSESGESHAKSFVMSVVVDGQFFEGSGRNKKLAKARAAQSALAAIFNLHLDQTPSRQPIPSEGLQLHLPQVLADAVSRLVLGKFGDLTDNFSSPHARRKVLAGVVMTTGTDVKDAKVISVSTGTKCINGEYMSDRGLALNDCHAEIISRRSLLRFLYTQLELYLNNKDDQKRSIFQKSERGGFRLKENVQFHLYISTSPCGDARIFSPHEPILEEPADRHPNRKARGQLRTKIESGRGTIPVRSYASIQTWDGVLQGERLLTMSCSDKIARWNVVGIQGSLLSIFVEPIYFSSIILGSLYHGDHLSRAMYQRISNIEDLPPLYTLNKPLLSGISNAEARQPGKAPNFSVNWTVGDSAIEVINATTGKDELGRASRLCKHALYCRWMRVHGKVPSHLLRSKITKPNVYHESKLAAKEYQAAKARLFTAFIKAGLGAWVEKPTEQDQFSLTP

SEQ ID NO: 45 - protein, 701 aa, Artificial Sequence
  ADAR Polypeptide Sequence
MDIEDEENMSSSSTDVKENRNLDNVSPKDGSTPGPGEGSQLSNGGGGGPGRKRPLEEGSNGHSKYRLKKRRKTPGPVLPKNALMQLNEIKPGLQYTLLSQTGPVHAPLFVMSVEVNGQVFEGSGPTKKKAKLHAAEKALRSFVQFPNASEAHLAMGRTLSVNTDFTSDQADFPDTLFNGFETPDKAEPPFYVGSNGDDSFSSSGDLSLSASPVPASLAQPPLPVLPPFPPPSGKNPVMILNELRPGLKYDFLSESGESHAKSFVMSVVVDGQFFEGSGRNKKLAKARAAQSALAAIFNLHLDQTPSRQPIPSEGLQLHLPQVLADAVSRLVLGKFGDLTDNFSSPHARRKVLAGVVMTTGTDVKDAKVISVSTGTKCINGEYMSDRGLALNDCHAEIISRRSLLRFLYTQLELYLNNKDDQKRSIFQKSERGGFRLKENVQFHLYISTSPCGDARIFSPHEPILEEPADRHPNRKARGQLRTKIESGKGTIPVRSYASIQTWDGVLQGERLLTMSCSDKIARWNVVGIQGSLLSIFVEPIYFSSIILGSLYHGDHLSRAMYQRISNIEDLPPLYTLNKPLLSGISNAEARQPGKAPNFSVNWTVGDSAIEVINATTGKDELGRASRLCKHALYCRWMRVHGKVPSHLLRSKITKPNVYHESKLAAKEYQAAKARLFTAFIKAGLGAWVEKPTEQDQFSLTP

SEQ ID NO: 46 - protein, 701 aa, Artificial Sequence
  ADAR Polypeptide Sequence
MDIEDEENMSSSSTDVKENRNLDNVSPKDGSTPGPGEGSQLSNGGGGGPGRKRPLEEGSNGHSKYRLKKRRKTPGPVLPKNALMQLNEIKPGLQYTLLSQTGPVHAPLFVMSVEVNGQVFEGSGPTKKKAKLHAAEKALRSFVQFPNASEAHLAMGRTLSVNTDFTSDQADFPDTLFNGFETPDKAEPPFYVGSNGDDSFSSSGDLSLSASPVPASLAQPPLPVLPPFPPPSGKNPVMILNELRPGLKYDFLSESGESHAKSFVMSVVVDGQFFEGSGRNKKLAKARAAQSALAAIFNLHLDQTPSRQPIPSEGLQLHLPQVLADAVSRLVLGKFGDLTDNFSSPHARRKVLAGVVMTTGTDVKDAKVISVSTGTKCINGEYMSDRGLALNDCHAEIISRRSLLRFLYTQLELYLNNKDDQKRSIFQKSERGGFRLKENVQFHLYISTSPCGDARIFSPHEPILEEPADRHPNRKARGQLRTKIESGNGTIPVRSYASIQTWDGVLQGERLLTMSCSDKIARWNVVGIQGSLLSIFVEPIYFSSIILGSLYHGDHLSRAMYQRISNIEDLPPLYTLNKPLLSGISNAEARQPGKAPNFSVNWTVGDSAIEVINATTGKDELGRASRLCKHALYCRWMRVHGKVPSHLLRSKITKPNVYHESKLAAKEYQAAKARLFTAFIKAGLGAWVEKPTEQDQFSLTP

SEQ ID NO: 47 - protein, 701 aa, Artificial Sequence
  ADAR Polypeptide Sequence
MDIEDEENMSSSSTDVKENRNLDNVSPKDGSTPGPGEGSQLSNGGGGGPGRKRPLEEGSNGHSKYRLKKRRKTPGPVLPKNALMQLNEIKPGLQYTLLSQTGPVHAPLFVMSVEVNGQVFEGSGPTKKKAKLHAAEKALRSFVQFPNASEAHLAMGRTLSVNTDFTSDQADFPDTLFNGFETPDKAEPPFYVGSNGDDSFSSSGDLSLSASPVPASLAQPPLPVLPPFPPPSGKNPVMILNELRPGLKYDFLSESGESHAKSFVMSVVVDGQFFEGSGRNKKLAKARAAQSALAAIFNLHLDQTPSRQPIPSEGLQLHLPQVLADAVSRLVLGKFGDLTDNFSSPHARRKVLAGVVMTTGTDVKDAKVISVSTGTKCINGEYMSDRGLALNDCHAEIISRRSLLRFLYTQLELYLNNKDDQKRSIFQKSERGGFRLKENVQFHLYISTSPCGDARIFSPHEPILEEPADRHPNRKARGQLRTKIESGAGTIPVRSYASIQTWDGVLQGERLLTMSCSDKIARWNVVGIQGSLLSIFVEPIYFSSIILGSLYHGDHLSRAMYQRISNIEDLPPLYTLNKPLLSGISNAEARQPGKAPNFSVNWTVGDSAIEVINATTGKDELGRASRLCKHALYCRWMRVHGKVPSHLLRSKITKPNVYHESKLAAKEYQAAKARLFTAFIKAGLGAWVEKPTEQDQFSLTP

SEQ ID NO: 48 - protein, 701 aa, Artificial Sequence
  ADAR Polypeptide Sequence
MDIEDEENMSSSSTDVKENRNLDNVSPKDGSTPGPGEGSQLSNGGGGGPGRKRPLEEGSNGHSKYRLKKRRKTPGPVLPKNALMQLNEIKPGLQYTLLSQTGPVHAPLFVMSVEVNGQVFEGSGPTKKKAKLHAAEKALRSFVQFPNASEAHLAMGRTLSVNTDFTSDQADFPDTLFNGFETPDKAEPPFYVGSNGDDSFSSSGDLSLSASPVPASLAQPPLPVLPPFPPPSGKNPVMILNELRPGLKYDFLSESGESHAKSFVMSVVVDGQFFEGSGRNKKLAKARAAQSALAAIFNLHLDQTPSRQPIPSEGLQLHLPQVLADAVSRLVLGKFGDLTDNFSSPHARRKVLAGVVMTTGTDVKDAKVISVSTGTKCINGEYMSDRGLALNDCHAEIISRRSLLRFLYTQLELYLNNKDDQKRSIFQKSERGGFRLKENVQFHLYISTSPCGDARIFSPHEPILEEPADRHPNRKARGQLRTKIESGMGTIPVRSYASIQTWDGVLQGERLLTMSCSDKIARWNVVGIQGSLLSIFVEPIYFSSIILGSLYHGDHLSRAMYQRISNIEDLPPLYTLNKPLLSGISNAEARQPGKAPNFSVNWTVGDSAIEVINATTGKDELGRASRLCKHALYCRWMRVHGKVPSHLLRSKITKPNVYHESKLAAKEYQAAKARLFTAFIKAGLGAWVEKPTEQDQFSLTP

SEQ ID NO: 49 - protein, 701 aa, Artificial Sequence
  ADAR Polypeptide Sequence
MDIEDEENMSSSSTDVKENRNLDNVSPKDGSTPGPGEGSQLSNGGGGGPGRKRPLEEGSNGHSKYRLKKRRKTPGPVLPKNALMQLNEIKPGLQYTLLSQTGPVHAPLFVMSVEVNGQVFEGSGPTKKKAKLHAAEKALRSFVQFPNASEAHLAMGRTLSVNTDFTSDQADFPDTLFNGFETPDKAEPPFYVGSNGDDSFSSSGDLSLSASPVPASLAQPPLPVLPPFPPPSGKNPVMILNELRPGLKYDFLSESGESHAKSFVMSVVVDGQFFEGSGRNKKLAKARAAQSALAAIFNLHLDQTPSRQPIPSEGLQLHLPQVLADAVSRLVLGKFGDLTDNFSSPHARRKVLAGVVMTTGTDVKDAKVISVSTGTKCINGEYMSDRGLALNDCHAEIISRRSLLRFLYTQLELYLNNKDDQKRSIFQKSERGGFRLKENVQFHLYISTSPCGDARIFSPHEPILEEPADRHPNRKARGQLRTKIESGSGTIPVRSYASIQTWDGVLQGERLLTMSCSDKIARWNVVGIQGSLLSIFVEPIYFSSIILGSLYHGDHLSRAMYQRISNIEDLPPLYTLNKPLLSGISNAEARQPGKAPNFSVNWTVGDSAIEVINATTGKDELGRASRLCKHALYCRWMRVHGKVPSHLLRSKITKPNVYHESKLAAKEYQAAKARLFTAFIKAGLGAWVEKPTEQDQFSLTP

SEQ ID NO: 50 - protein, 701 aa, Artificial Sequence
  ADAR Polypeptide Sequence
MDIEDEENMSSSSTDVKENRNLDNVSPKDGSTPGPGEGSQLSNGGGGGPGRKRPLEEGSNGHSKYRLKKRRKTPGPVLPKNALMQLNEIKPGLQYTLLSQTGPVHAPLFVMSVEVNGQVFEGSGPTKKKAKLHAAEKALRSFVQFPNASEAHLAMGRTLSVNTDFTSDQADFPDTLFNGFETPDKAEPPFYVGSNGDDSFSSSGDLSLSASPVPASLAQPPLPVLPPFPPPSGKNPVMILNELRPGLKYDFLSESGESHAKSFVMSVVVDGQFFEGSGRNKKLAKARAAQSALAAIFNLHLDQTPSRQPIPSEGLQLHLPQVLADAVSRLVLGKFGDLTDNFSSPHARRKVLAGVVMTTGTDVKDAKVISVSTGTKCINGEYMSDRGLALNDCHAEIISRRSLLRFLYTQLELYLNNKDDQKRSIFQKSERGGFRLKENVQFHLYISTSPCGDARIFSPHEPILEEPADRHPNRKARGQLRTKIESGFGTIPVRSYASIQTWDGVLQGERLLTMSCSDKIARWNVVGIQGSLLSIFVEPIYFSSIILGSLYHGDHLSRAMYQRISNIEDLPPLYTLNKPLLSGISNAEARQPGKAPNFSVNWTVGDSAIEVINATTGKDELGRASRLCKHALYCRWMRVHGKVPSHLLRSKITKPNVYHESKLAAKEYQAAKARLFTAFIKAGLGAWVEKPTEQDQFSLTP

SEQ ID NO: 51 - protein, 701 aa, Artificial Sequence
  ADAR Polypeptide Sequence
MDIEDEENMSSSSTDVKENRNLDNVSPKDGSTPGPGEGSQLSNGGGGGPGRKRPLEEGSNGHSKYRLKKRRKTPGPVLPKNALMQLNEIKPGLQYTLLSQTGPVHAPLFVMSVEVNGQVFEGSGPTKKKAKLHAAEKALRSFVQFPNASEAHLAMGRTLSVNTDFTSDQADFPDTLFNGFETPDKAEPPFYVGSNGDDSFSSSGDLSLSASPVPASLAQPPLPVLPPFPPPSGKNPVMILNELRPGLKYDFLSESGESHAKSFVMSVVVDGQFFEGSGRNKKLAKARAAQSALAAIFNLHLDQTPSRQPIPSEGLQLHLPQVLADAVSRLVLGKFGDLTDNFSSPHARRKVLAGVVMTTGTDVKDAKVISVSTGTKCINGEYMSDRGLALNDCHAEIISRRSLLRFLYTQLELYLNNKDDQKRSIFQKSERGGFRLKENVQFHLYISTSPCGDARIFSPHEPILEEPADRHPNRKARGQLRTKIESGLGTIPVRSYASIQTWDGVLQGERLLTMSCSDKIARWNVVGIQGSLLSIFVEPIYFSSIILGSLYHGDHLSRAMYQRISNIEDLPPLYTLNKPLLSGISNAEARQPGKAPNFSVNWTVGDSAIEVINATTGKDELGRASRLCKHALYCRWMRVHGKVPSHLLRSKITKPNVYHESKLAAKEYQAAKARLFTAFIKAGLGAWVEKPTEQDQFSLTP

SEQ ID NO: 52 - protein, 701 aa, Artificial Sequence
  ADAR Polypeptide Sequence
MDIEDEENMSSSSTDVKENRNLDNVSPKDGSTPGPGEGSQLSNGGGGGPGRKRPLEEGSNGHSKYRLKKRRKTPGPVLPKNALMQLNEIKPGLQYTLLSQTGPVHAPLFVMSVEVNGQVFEGSGPTKKKAKLHAAEKALRSFVQFPNASEAHLAMGRTLSVNTDFTSDQADFPDTLFNGFETPDKAEPPFYVGSNGDDSFSSSGDLSLSASPVPASLAQPPLPVLPPFPPPSGKNPVMILNELRPGLKYDFLSESGESHAKSFVMSVVVDGQFFEGSGRNKKLAKARAAQSALAAIFNLHLDQTPSRQPIPSEGLQLHLPQVLADAVSRLVLGKFGDLTDNFSSPHARRKVLAGVVMTTGTDVKDAKVISVSTGTKCINGEYMSDRGLALNDCHAEIISRRSLLRFLYTQLELYLNNKDDQKRSIFQKSERGGFRLKENVQFHLYISTSPCGDARIFSPHEPILEEPADRHPNRKARGQLRTKIESGWGTIPVRSYASIQTWDGVLQGERLLTMSCSDKIARWNVVGIQGSLLSIFVEPIYFSSIILGSLYHGDHLSRAMYQRISNIEDLPPLYTLNKPLLSGISNAEARQPGKAPNFSVNWTVGDSAIEVINATTGKDELGRASRLCKHALYCRWMRVHGKVPSHLLRSKITKPNVYHESKLAAKEYQAAKARLFTAFIKAGLGAWVEKPTEQDQFSLTP

SEQ ID NO: 53 - protein, 701 aa, Artificial Sequence
  ADAR Polypeptide Sequence
MDIEDEENMSSSSTDVKENRNLDNVSPKDGSTPGPGEGSQLSNGGGGGPGRKRPLEEGSNGHSKYRLKKRRKTPGPVLPKNALMQLNEIKPGLQYTLLSQTGPVHAPLFVMSVEVNGQVFEGSGPTKKKAKLHAAEKALRSFVQFPNASEAHLAMGRTLSVNTDFTSDQADFPDTLFNGFETPDKAEPPFYVGSNGDDSFSSSGDLSLSASPVPASLAQPPLPVLPPFPPPSGKNPVMILNELRPGLKYDFLSESGESHAKSFVMSVVVDGQFFEGSGRNKKLAKARAAQSALAAIFNLHLDQTPSRQPIPSEGLQLHLPQVLADAVSRLVLGKFGDLTDNFSSPHARRKVLAGVVMTTGTDVKDAKVISVSTGTKCINGEYMSDRGLALNDCHAEIISRRSLLRFLYTQLELYLNNKDDQKRSIFQKSERGGFRLKENVQFHLYISTSPCGDARIFSPHEPILEEPADRHPNRKARGQLRTKIESGQGTIPVRSNASIQTWDGVLQGERLLTMSCSDKIARWNVVGIQGSLLSIFVEPIYFSSIILGSLYHGDHLSRAMYQRISNIEDLPPLYTLNKPLLSGISNAEARQPGKAPNFSVNWTVGDSAIEVINATTGKDELGRASRLCKHALYCRWMRVHGKVPSHLLRSKITKPNVYHESKLAAKEYQAAKARLFTAFIKAGLGAWVEKPTEQDQFSLTP

SEQ ID NO: 54 - protein, 701 aa, Artificial Sequence
  ADAR Polypeptide Sequence
MDIEDEENMSSSSTDVKENRNLDNVSPKDGSTPGPGEGSQLSNGGGGGPGRKRPLEEGSNGHSKYRLKKRRKTPGPVLPKNALMQLNEIKPGLQYTLLSQTGPVHAPLFVMSVEVNGQVFEGSGPTKKKAKLHAAEKALRSFVQFPNASEAHLAMGRTLSVNTDFTSDQADFPDTLFNGFETPDKAEPPFYVGSNGDDSFSSSGDLSLSASPVPASLAQPPLPVLPPFPPPSGKNPVMILNELRPGLKYDFLSESGESHAKSFVMSVVVDGQFFEGSGRNKKLAKARAAQSALAAIFNLHLDQTPSRQPIPSEGLQLHLPQVLADAVSRLVLGKFGDLTDNFSSPHARRKVLAGVVMTTGTDVKDAKVISVSTGTKCINGEYMSDRGLALNDCHAEIISRRSLLRFLYTQLELYLNNKDDQKRSIFQKSERGGFRLKENVQFHLYISTSPCGDARIFSPHEPILEEPADRHPNRKARGQLRTKIESGHGTIPVRSNASIQTWDGVLQGERLLTMSCSDKIARWNVVGIQGSLLSIFVEPIYFSSIILGSLYHGDHLSRAMYQRISNIEDLPPLYTLNKPLLSGISNAEARQPGKAPNFSVNWTVGDSAIEVINATTGKDELGRASRLCKHALYCRWMRVHGKVPSHLLRSKITKPNVYHESKLAAKEYQAAKARLFTAFIKAGLGAWVEKPTEQDQFSLTP

SEQ ID NO: 55 - protein, 701 aa, Artificial Sequence
  ADAR Polypeptide Sequence
MDIEDEENMSSSSTDVKENRNLDNVSPKDGSTPGPGEGSQLSNGGGGGPGRKRPLEEGSNGHSKYRLKKRRKTPGPVLPKNALMQLNEIKPGLQYTLLSQTGPVHAPLFVMSVEVNGQVFEGSGPTKKKAKLHAAEKALRSFVQFPNASEAHLAMGRTLSVNTDFTSDQADFPDTLFNGFETPDKAEPPFYVGSNGDDSFSSSGDLSLSASPVPASLAQPPLPVLPPFPPPSGKNPVMILNELRPGLKYDFLSESGESHAKSFVMSVVVDGQFFEGSGRNKKLAKARAAQSALAAIFNLHLDQTPSRQPIPSEGLQLHLPQVLADAVSRLVLGKFGDLTDNFSSPHARRKVLAGVVMTTGTDVKDAKVISVSTGTKCINGEYMSDRGLALNDCHAEIISRRSLLRFLYTQLELYLNNKDDQKRSIFQKSERGGFRLKENVQFHLYISTSPCGDARIFSPHEPILEEPADRHPNRKARGQLRTKIESGRGTIPVRSNASIQTWDGVLQGERLLTMSCSDKIARWNVVGIQGSLLSIFVEPIYFSSIILGSLYHGDHLSRAMYQRISNIEDLPPLYTLNKPLLSGISNAEARQPGKAPNFSVNWTVGDSAIEVINATTGKDELGRASRLCKHALYCRWMRVHGKVPSHLLRSKITKPNVYHESKLAAKEYQAAKARLFTAFIKAGLGAWVEKPTEQDQFSLTP

SEQ ID NO: 56 - protein, 701 aa, Artificial Sequence
  ADAR Polypeptide Sequence
MDIEDEENMSSSSTDVKENRNLDNVSPKDGSTPGPGEGSQLSNGGGGGPGRKRPLEEGSNGHSKYRLKKRRKTPGPVLPKNALMQLNEIKPGLQYTLLSQTGPVHAPLFVMSVEVNGQVFEGSGPTKKKAKLHAAEKALRSFVQFPNASEAHLAMGRTLSVNTDFTSDQADFPDTLFNGFETPDKAEPPFYVGSNGDDSFSSSGDLSLSASPVPASLAQPPLPVLPPFPPPSGKNPVMILNELRPGLKYDFLSESGESHAKSFVMSVVVDGQFFEGSGRNKKLAKARAAQSALAAIFNLHLDQTPSRQPIPSEGLQLHLPQVLADAVSRLVLGKFGDLTDNFSSPHARRKVLAGVVMTTGTDVKDAKVISVSTGTKCINGEYMSDRGLALNDCHAEIISRRSLLRFLYTQLELYLNNKDDQKRSIFQKSERGGFRLKENVQFHLYISTSPCGDARIFSPHEPILEEPADRHPNRKARGQLRTKIESGKGTIPVRSNASIQTWDGVLQGERLLTMSCSDKIARWNVVGIQGSLLSIFVEPIYFSSIILGSLYHGDHLSRAMYQRISNIEDLPPLYTLNKPLLSGISNAEARQPGKAPNFSVNWTVGDSAIEVINATTGKDELGRASRLCKHALYCRWMRVHGKVPSHLLRSKITKPNVYHESKLAAKEYQAAKARLFTAFIKAGLGAWVEKPTEQDQFSLTP

SEQ ID NO: 57 - protein, 701 aa, Artificial Sequence
  ADAR Polypeptide Sequence
MDIEDEENMSSSSTDVKENRNLDNVSPKDGSTPGPGEGSQLSNGGGGGPGRKRPLEEGSNGHSKYRLKKRRKTPGPVLPKNALMQLNEIKPGLQYTLLSQTGPVHAPLFVMSVEVNGQVFEGSGPTKKKAKLHAAEKALRSFVQFPNASEAHLAMGRTLSVNTDFTSDQADFPDTLFNGFETPDKAEPPFYVGSNGDDSFSSSGDLSLSASPVPASLAQPPLPVLPPFPPPSGKNPVMILNELRPGLKYDFLSESGESHAKSFVMSVVVDGQFFEGSGRNKKLAKARAAQSALAAIFNLHLDQTPSRQPIPSEGLQLHLPQVLADAVSRLVLGKFGDLTDNFSSPHARRKVLAGVVMTTGTDVKDAKVISVSTGTKCINGEYMSDRGLALNDCHAEIISRRSLLRFLYTQLELYLNNKDDQKRSIFQKSERGGFRLKENVQFHLYISTSPCGDARIFSPHEPILEEPADRHPNRKARGQLRTKIESGNGTIPVRSNASIQTWDGVLQGERLLTMSCSDKIARWNVVGIQGSLLSIFVEPIYFSSIILGSLYHGDHLSRAMYQRISNIEDLPPLYTLNKPLLSGISNAEARQPGKAPNFSVNWTVGDSAIEVINATTGKDELGRASRLCKHALYCRWMRVHGKVPSHLLRSKITKPNVYHESKLAAKEYQAAKARLFTAFIKAGLGAWVEKPTEQDQFSLTP

SEQ ID NO: 58 - protein, 701 aa, Artificial Sequence
  ADAR Polypeptide Sequence
MDIEDEENMSSSSTDVKENRNLDNVSPKDGSTPGPGEGSQLSNGGGGGPGRKRPLEEGSNGHSKYRLKKRRKTPGPVLPKNALMQLNEIKPGLQYTLLSQTGPVHAPLFVMSVEVNGQVFEGSGPTKKKAKLHAAEKALRSFVQFPNASEAHLAMGRTLSVNTDFTSDQADFPDTLFNGFETPDKAEPPFYVGSNGDDSFSSSGDLSLSASPVPASLAQPPLPVLPPFPPPSGKNPVMILNELRPGLKYDFLSESGESHAKSFVMSVVVDGQFFEGSGRNKKLAKARAAQSALAAIFNLHLDQTPSRQPIPSEGLQLHLPQVLADAVSRLVLGKFGDLTDNFSSPHARRKVLAGVVMTTGTDVKDAKVISVSTGTKCINGEYMSDRGLALNDCHAEIISRRSLLRFLYTQLELYLNNKDDQKRSIFQKSERGGFRLKENVQFHLYISTSPCGDARIFSPHEPILEEPADRHPNRKARGQLRTKIESGAGTIPVRSNASIQTWDGVLQGERLLTMSCSDKIARWNVVGIQGSLLSIFVEPIYFSSIILGSLYHGDHLSRAMYQRISNIEDLPPLYTLNKPLLSGISNAEARQPGKAPNFSVNWTVGDSAIEVINATTGKDELGRASRLCKHALYCRWMRVHGKVPSHLLRSKITKPNVYHESKLAAKEYQAAKARLFTAFIKAGLGAWVEKPTEQDQFSLTP

SEQ ID NO: 59 - protein, 701 aa, Artificial Sequence
  ADAR Polypeptide Sequence
MDIEDEENMSSSSTDVKENRNLDNVSPKDGSTPGPGEGSQLSNGGGGGPGRKRPLEEGSNGHSKYRLKKRRKTPGPVLPKNALMQLNEIKPGLQYTLLSQTGPVHAPLFVMSVEVNGQVFEGSGPTKKKAKLHAAEKALRSFVQFPNASEAHLAMGRTLSVNTDFTSDQADFPDTLFNGFETPDKAEPPFYVGSNGDDSFSSSGDLSLSASPVPASLAQPPLPVLPPFPPPSGKNPVMILNELRPGLKYDFLSESGESHAKSFVMSVVVDGQFFEGSGRNKKLAKARAAQSALAAIFNLHLDQTPSRQPIPSEGLQLHLPQVLADAVSRLVLGKFGDLTDNFSSPHARRKVLAGVVMTTGTDVKDAKVISVSTGTKCINGEYMSDRGLALNDCHAEIISRRSLLRFLYTQLELYLNNKDDQKRSIFQKSERGGFRLKENVQFHLYISTSPCGDARIFSPHEPILEEPADRHPNRKARGQLRTKIESGMGTIPVRSNASIQTWDGVLQGERLLTMSCSDKIARWNVVGIQGSLLSIFVEPIYFSSIILGSLYHGDHLSRAMYQRISNIEDLPPLYTLNKPLLSGISNAEARQPGKAPNFSVNWTVGDSAIEVINATTGKDELGRASRLCKHALYCRWMRVHGKVPSHLLRSKITKPNVYHESKLAAKEYQAAKARLFTAFIKAGLGAWVEKPTEQDQFSLTP

SEQ ID NO: 60 - protein, 701 aa, Artificial Sequence
  ADAR Polypeptide Sequence
MDIEDEENMSSSSTDVKENRNLDNVSPKDGSTPGPGEGSQLSNGGGGGPGRKRPLEEGSNGHSKYRLKKRRKTPGPVLPKNALMQLNEIKPGLQYTLLSQTGPVHAPLFVMSVEVNGQVFEGSGPTKKKAKLHAAEKALRSFVQFPNASEAHLAMGRTLSVNTDFTSDQADFPDTLFNGFETPDKAEPPFYVGSNGDDSFSSSGDLSLSASPVPASLAQPPLPVLPPFPPPSGKNPVMILNELRPGLKYDFLSESGESHAKSFVMSVVVDGQFFEGSGRNKKLAKARAAQSALAAIFNLHLDQTPSRQPIPSEGLQLHLPQVLADAVSRLVLGKFGDLTDNFSSPHARRKVLAGVVMTTGTDVKDAKVISVSTGTKCINGEYMSDRGLALNDCHAEIISRRSLLRFLYTQLELYLNNKDDQKRSIFQKSERGGFRLKENVQFHLYISTSPCGDARIFSPHEPILEEPADRHPNRKARGQLRTKIESGSGTIPVRSNASIQTWDGVLQGERLLTMSCSDKIARWNVVGIQGSLLSIFVEPIYFSSIILGSLYHGDHLSRAMYQRISNIEDLPPLYTLNKPLLSGISNAEARQPGKAPNFSVNWTVGDSAIEVINATTGKDELGRASRLCKHALYCRWMRVHGKVPSHLLRSKITKPNVYHESKLAAKEYQAAKARLFTAFIKAGLGAWVEKPTEQDQFSLTP

SEQ ID NO: 61 - protein, 701 aa, Artificial Sequence
  ADAR Polypeptide Sequence
MDIEDEENMSSSSTDVKENRNLDNVSPKDGSTPGPGEGSQLSNGGGGGPGRKRPLEEGSNGHSKYRLKKRRKTPGPVLPKNALMQLNEIKPGLQYTLLSQTGPVHAPLFVMSVEVNGQVFEGSGPTKKKAKLHAAEKALRSFVQFPNASEAHLAMGRTLSVNTDFTSDQADFPDTLFNGFETPDKAEPPFYVGSNGDDSFSSSGDLSLSASPVPASLAQPPLPVLPPFPPPSGKNPVMILNELRPGLKYDFLSESGESHAKSFVMSVVVDGQFFEGSGRNKKLAKARAAQSALAAIFNLHLDQTPSRQPIPSEGLQLHLPQVLADAVSRLVLGKFGDLTDNFSSPHARRKVLAGVVMTTGTDVKDAKVISVSTGTKCINGEYMSDRGLALNDCHAEIISRRSLLRFLYTQLELYLNNKDDQKRSIFQKSERGGFRLKENVQFHLYISTSPCGDARIFSPHEPILEEPADRHPNRKARGQLRTKIESGFGTIPVRSNASIQTWDGVLQGERLLTMSCSDKIARWNVVGIQGSLLSIFVEPIYFSSIILGSLYHGDHLSRAMYQRISNIEDLPPLYTLNKPLLSGISNAEARQPGKAPNFSVNWTVGDSAIEVINATTGKDELGRASRLCKHALYCRWMRVHGKVPSHLLRSKITKPNVYHESKLAAKEYQAAKARLFTAFIKAGLGAWVEKPTEQDQFSLTP

SEQ ID NO: 62 - protein, 701 aa, Artificial Sequence
  ADAR Polypeptide Sequence
MDIEDEENMSSSSTDVKENRNLDNVSPKDGSTPGPGEGSQLSNGGGGGPGRKRPLEEGSNGHSKYRLKKRRKTPGPVLPKNALMQLNEIKPGLQYTLLSQTGPVHAPLFVMSVEVNGQVFEGSGPTKKKAKLHAAEKALRSFVQFPNASEAHLAMGRTLSVNTDFTSDQADFPDTLFNGFETPDKAEPPFYVGSNGDDSFSSSGDLSLSASPVPASLAQPPLPVLPPFPPPSGKNPVMILNELRPGLKYDFLSESGESHAKSFVMSVVVDGQFFEGSGRNKKLAKARAAQSALAAIFNLHLDQTPSRQPIPSEGLQLHLPQVLADAVSRLVLGKFGDLTDNFSSPHARRKVLAGVVMTTGTDVKDAKVISVSTGTKCINGEYMSDRGLALNDCHAEIISRRSLLRFLYTQLELYLNNKDDQKRSIFQKSERGGFRLKENVQFHLYISTSPCGDARIFSPHEPILEEPADRHPNRKARGQLRTKIESGLGTIPVRSNASIQTWDGVLQGERLLTMSCSDKIARWNVVGIQGSLLSIFVEPIYFSSIILGSLYHGDHLSRAMYQRISNIEDLPPLYTLNKPLLSGISNAEARQPGKAPNFSVNWTVGDSAIEVINATTGKDELGRASRLCKHALYCRWMRVHGKVPSHLLRSKITKPNVYHESKLAAKEYQAAKARLFTAFIKAGLGAWVEKPTEQDQFSLTP

SEQ ID NO: 63 - protein, 701 aa, Artificial Sequence
  ADAR Polypeptide Sequence
MDIEDEENMSSSSTDVKENRNLDNVSPKDGSTPGPGEGSQLSNGGGGGPGRKRPLEEGSNGHSKYRLKKRRKTPGPVLPKNALMQLNEIKPGLQYTLLSQTGPVHAPLFVMSVEVNGQVFEGSGPTKKKAKLHAAEKALRSFVQFPNASEAHLAMGRTLSVNTDFTSDQADFPDTLFNGFETPDKAEPPFYVGSNGDDSFSSSGDLSLSASPVPASLAQPPLPVLPPFPPPSGKNPVMILNELRPGLKYDFLSESGESHAKSFVMSVVVDGQFFEGSGRNKKLAKARAAQSALAAIFNLHLDQTPSRQPIPSEGLQLHLPQVLADAVSRLVLGKFGDLTDNFSSPHARRKVLAGVVMTTGTDVKDAKVISVSTGTKCINGEYMSDRGLALNDCHAEIISRRSLLRFLYTQLELYLNNKDDQKRSIFQKSERGGFRLKENVQFHLYISTSPCGDARIFSPHEPILEEPADRHPNRKARGQLRTKIESGWGTIPVRSNASIQTWDGVLQGERLLTMSCSDKIARWNVVGIQGSLLSIFVEPIYFSSIILGSLYHGDHLSRAMYQRISNIEDLPPLYTLNKPLLSGISNAEARQPGKAPNFSVNWTVGDSAIEVINATTGKDELGRASRLCKHALYCRWMRVHGKVPSHLLRSKITKPNVYHESKLAAKEYQAAKARLFTAFIKAGLGAWVEKPTEQDQFSLTP

SEQ ID NO: 64 - protein, 1226 aa, Artificial Sequence
  ADAR Polypeptide Sequence
MNPRQGYSLSGYYTHPFQGYEHRQLRYQQPGPGSSPSSFLLKQIEFLKGQLPEAPVIGKQTPSLPPSLPGLRPRFPVLLASSTRGRQVDIRGVPRGVHLRSQGLQRGFQHPSPRGRSLPQRGVDCLSSHFQELSIYQDQEQRILKFLEELGEGKATTAHDLSGKLGTPKKEINRVLYSLAKKGKLQKEAGTPPLWKIAVSTQAWNQHSGVVRPDGHSQGAPNSDPSLEPEDRNSTSVSEDLLEPFIAVSAQAWNQHSGVVRPDSHSQGSPNSDPGLEPEDSNSTSALEDPLEFLDMAEIKEKICDYLFNVSDSSALNLAKNIGLTKARDINAVLIDMERQGDVYRQGTTPPIWHLTDKKRERMQIKRNTNSVPETAPAAIPETKRNAEFLTCNIPTSNASNNMVTTEKVENGQEPVIKLENRQEARPEPARLKPPVHYNGPSKAGYVDFENGQWATDDIPDDLNSIRAAPGEFRAIMEMPSFYSHGLPRCSPYKKLTECQLKNPISGLLEYAQFASQTCEFNMIEQSGPPHEPRFKFQVVINGREFPPAEAGSKKVAKQDAAMKAMTILLEEAKAKDSGKSEESSHYSTEKESEKTAESQTPTPSATSFFSGKSPVTTLLECMHKLGNSCEFRLLSKEGPAHEPKFQYCVAVGAQTFPSVSAPSKKVAKQMAAEEAMKALHGEATNSMASDNQPEGMISESLDNLESMMPNKVRKIGELVRYLNTNPVGGLLEYARSHGFAAEFKLVDQSGPPHEPKFVYQAKVGGRWFPAVCAHSKKQGKQEAADAALRVLIGENEKAERMGFTEVTPVTGASLRRTMLLLSRSPEAQPKTLPLTGSTFHDQIAMLSHRCFNTLTNSFQPSLLGRKILAAIIMKKDSEDMGVVVSLGTGNRCVKGDSLSLKGETVNDCHAEIISRRGFIRFLYSELMKYNSQTAKDSIFEPAKGGEKLQIKKTVSFHLYISTAPCGDGALFDKSCSDRAMESTESRHYPVFENPKQGKLRTKVENGEGTIPVESFDIVPTWDGIRLGERLRTMSCSDKILRWNVLGLQGALLTHFLQPIYLKSVTLGYLFSQGHLTRAICCRVTRDGSAFEDGLRHPFIVNHPKVGRVSIYDSKRQSGKTKETSVNWCLADGYDLEILDGTRGTVDGPRNELSRVSKKNIFLLFKKLCSFRYRRDLLRLSYGEAKKAARDYETAKNYFKKGLKDMGYGNWISKPQEEKNFYLCPV

SEQ ID NO: 65 - protein, 1226 aa, Artificial Sequence
  ADAR Polypeptide Sequence
MNPRQGYSLSGYYTHPFQGYEHRQLRYQQPGPGSSPSSFLLKQIEFLKGQLPEAPVIGKQTPSLPPSLPGLRPRFPVLLASSTRGRQVDIRGVPRGVHLRSQGLQRGFQHPSPRGRSLPQRGVDCLSSHFQELSIYQDQEQRILKFLEELGEGKATTAHDLSGKLGTPKKEINRVLYSLAKKGKLQKEAGTPPLWKIAVSTQAWNQHSGVVRPDGHSQGAPNSDPSLEPEDRNSTSVSEDLLEPFIAVSAQAWNQHSGVVRPDSHSQGSPNSDPGLEPEDSNSTSALEDPLEFLDMAEIKEKICDYLFNVSDSSALNLAKNIGLTKARDINAVLIDMERQGDVYRQGTTPPIWHLTDKKRERMQIKRNTNSVPETAPAAIPETKRNAEFLTCNIPTSNASNNMVTTEKVENGQEPVIKLENRQEARPEPARLKPPVHYNGPSKAGYVDFENGQWATDDIPDDLNSIRAAPGEFRAIMEMPSFYSHGLPRCSPYKKLTECQLKNPISGLLEYAQFASQTCEFNMIEQSGPPHEPRFKFQVVINGREFPPAEAGSKKVAKQDAAMKAMTILLEEAKAKDSGKSEESSHYSTEKESEKTAESQTPTPSATSFFSGKSPVTTLLECMHKLGNSCEFRLLSKEGPAHEPKFQYCVAVGAQTFPSVSAPSKKVAKQMAAEEAMKALHGEATNSMASDNQPEGMISESLDNLESMMPNKVRKIGELVRYLNTNPVGGLLEYARSHGFAAEFKLVDQSGPPHEPKFVYQAKVGGRWFPAVCAHSKKQGKQEAADAALRVLIGENEKAERMGFTEVTPVTGASLRRTMLLLSRSPEAQPKTLPLTGSTFHDQIAMLSHRCFNTLTNSFQPSLLGRKILAAIIMKKDSEDMGVVVSLGTGNRCVKGDSLSLKGETVNDCHAEIISRRGFIRFLYSELMKYNSQTAKDSIFEPAKGGEKLQIKKTVSFHLYISTAPCGDGALFDKSCSDRAMESTESRHYPVFENPKQGKLRTKVENGQGTIPVESFDIVPTWDGIRLGERLRTMSCSDKILRWNVLGLQGALLTHFLQPIYLKSVTLGYLFSQGHLTRAICCRVTRDGSAFEDGLRHPFIVNHPKVGRVSIYDSKRQSGKTKETSVNWCLADGYDLEILDGTRGTVDGPRNELSRVSKKNIFLLFKKLCSFRYRRDLLRLSYGEAKKAARDYETAKNYFKKGLKDMGYGNWISKPQEEKNFYLCPV

SEQ ID NO: 66 - protein, 1226 aa, Artificial Sequence
  ADAR Polypeptide Sequence
MNPRQGYSLSGYYTHPFQGYEHRQLRYQQPGPGSSPSSFLLKQIEFLKGQLPEAPVIGKQTPSLPPSLPGLRPRFPVLLASSTRGRQVDIRGVPRGVHLRSQGLQRGFQHPSPRGRSLPQRGVDCLSSHFQELSIYQDQEQRILKFLEELGEGKATTAHDLSGKLGTPKKEINRVLYSLAKKGKLQKEAGTPPLWKIAVSTQAWNQHSGVVRPDGHSQGAPNSDPSLEPEDRNSTSVSEDLLEPFIAVSAQAWNQHSGVVRPDSHSQGSPNSDPGLEPEDSNSTSALEDPLEFLDMAEIKEKICDYLFNVSDSSALNLAKNIGLTKARDINAVLIDMERQGDVYRQGTTPPIWHLTDKKRERMQIKRNTNSVPETAPAAIPETKRNAEFLTCNIPTSNASNNMVTTEKVENGQEPVIKLENRQEARPEPARLKPPVHYNGPSKAGYVDFENGQWATDDIPDDLNSIRAAPGEFRAIMEMPSFYSHGLPRCSPYKKLTECQLKNPISGLLEYAQFASQTCEFNMIEQSGPPHEPRFKFQVVINGREFPPAEAGSKKVAKQDAAMKAMTILLEEAKAKDSGKSEESSHYSTEKESEKTAESQTPTPSATSFFSGKSPVTTLLECMHKLGNSCEFRLLSKEGPAHEPKFQYCVAVGAQTFPSVSAPSKKVAKQMAAEEAMKALHGEATNSMASDNQPEGMISESLDNLESMMPNKVRKIGELVRYLNTNPVGGLLEYARSHGFAAEFKLVDQSGPPHEPKFVYQAKVGGRWFPAVCAHSKKQGKQEAADAALRVLIGENEKAERMGFTEVTPVTGASLRRTMLLLSRSPEAQPKTLPLTGSTFHDQIAMLSHRCFNTLTNSFQPSLLGRKILAAIIMKKDSEDMGVVVSLGTGNRCVKGDSLSLKGETVNDCHAEIISRRGFIRFLYSELMKYNSQTAKDSIFEPAKGGEKLQIKKTVSFHLYISTAPCGDGALFDKSCSDRAMESTESRHYPVFENPKQGKLRTKVENGHGTIPVESFDIVPTWDGIRLGERLRTMSCSDKILRWNVLGLQGALLTHFLQPIYLKSVTLGYLFSQGHLTRAICCRVTRDGSAFEDGLRHPFIVNHPKVGRVSIYDSKRQSGKTKETSVNWCLADGYDLEILDGTRGTVDGPRNELSRVSKKNIFLLFKKLCSFRYRRDLLRLSYGEAKKAARDYETAKNYFKKGLKDMGYGNWISKPQEEKNFYLCPV

SEQ ID NO: 67 - protein, 1226 aa, Artificial Sequence
  ADAR Polypeptide Sequence
MNPRQGYSLSGYYTHPFQGYEHRQLRYQQPGPGSSPSSFLLKQIEFLKGQLPEAPVIGKQTPSLPPSLPGLRPRFPVLLASSTRGRQVDIRGVPRGVHLRSQGLQRGFQHPSPRGRSLPQRGVDCLSSHFQELSIYQDQEQRILKFLEELGEGKATTAHDLSGKLGTPKKEINRVLYSLAKKGKLQKEAGTPPLWKIAVSTQAWNQHSGVVRPDGHSQGAPNSDPSLEPEDRNSTSVSEDLLEPFIAVSAQAWNQHSGVVRPDSHSQGSPNSDPGLEPEDSNSTSALEDPLEFLDMAEIKEKICDYLFNVSDSSALNLAKNIGLTKARDINAVLIDMERQGDVYRQGTTPPIWHLTDKKRERMQIKRNTNSVPETAPAAIPETKRNAEFLTCNIPTSNASNNMVTTEKVENGQEPVIKLENRQEARPEPARLKPPVHYNGPSKAGYVDFENGQWATDDIPDDLNSIRAAPGEFRAIMEMPSFYSHGLPRCSPYKKLTECQLKNPISGLLEYAQFASQTCEFNMIEQSGPPHEPRFKFQVVINGREFPPAEAGSKKVAKQDAAMKAMTILLEEAKAKDSGKSEESSHYSTEKESEKTAESQTPTPSATSFFSGKSPVTTLLECMHKLGNSCEFRLLSKEGPAHEPKFQYCVAVGAQTFPSVSAPSKKVAKQMAAEEAMKALHGEATNSMASDNQPEGMISESLDNLESMMPNKVRKIGELVRYLNTNPVGGLLEYARSHGFAAEFKLVDQSGPPHEPKFVYQAKVGGRWFPAVCAHSKKQGKQEAADAALRVLIGENEKAERMGFTEVTPVTGASLRRTMLLLSRSPEAQPKTLPLTGSTFHDQIAMLSHRCFNTLTNSFQPSLLGRKILAAIIMKKDSEDMGVVVSLGTGNRCVKGDSLSLKGETVNDCHAEIISRRGFIRFLYSELMKYNSQTAKDSIFEPAKGGEKLQIKKTVSFHLYISTAPCGDGALFDKSCSDRAMESTESRHYPVFENPKQGKLRTKVENGRGTIPVESFDIVPTWDGIRLGERLRTMSCSDKILRWNVLGLQGALLTHFLQPIYLKSVTLGYLFSQGHLTRAICCRVTRDGSAFEDGLRHPFIVNHPKVGRVSIYDSKRQSGKTKETSVNWCLADGYDLEILDGTRGTVDGPRNELSRVSKKNIFLLFKKLCSFRYRRDLLRLSYGEAKKAARDYETAKNYFKKGLKDMGYGNWISKPQEEKNFYLCPV

SEQ ID NO: 68 - protein, 1226 aa, Artificial Sequence
  ADAR Polypeptide Sequence
MNPRQGYSLSGYYTHPFQGYEHRQLRYQQPGPGSSPSSFLLKQIEFLKGQLPEAPVIGKQTPSLPPSLPGLRPRFPVLLASSTRGRQVDIRGVPRGVHLRSQGLQRGFQHPSPRGRSLPQRGVDCLSSHFQELSIYQDQEQRILKFLEELGEGKATTAHDLSGKLGTPKKEINRVLYSLAKKGKLQKEAGTPPLWKIAVSTQAWNQHSGVVRPDGHSQGAPNSDPSLEPEDRNSTSVSEDLLEPFIAVSAQAWNQHSGVVRPDSHSQGSPNSDPGLEPEDSNSTSALEDPLEFLDMAEIKEKICDYLFNVSDSSALNLAKNIGLTKARDINAVLIDMERQGDVYRQGTTPPIWHLTDKKRERMQIKRNTNSVPETAPAAIPETKRNAEFLTCNIPTSNASNNMVTTEKVENGQEPVIKLENRQEARPEPARLKPPVHYNGPSKAGYVDFENGQWATDDIPDDLNSIRAAPGEFRAIMEMPSFYSHGLPRCSPYKKLTECQLKNPISGLLEYAQFASQTCEFNMIEQSGPPHEPRFKFQVVINGREFPPAEAGSKKVAKQDAAMKAMTILLEEAKAKDSGKSEESSHYSTEKESEKTAESQTPTPSATSFFSGKSPVTTLLECMHKLGNSCEFRLLSKEGPAHEPKFQYCVAVGAQTFPSVSAPSKKVAKQMAAEEAMKALHGEATNSMASDNQPEGMISESLDNLESMMPNKVRKIGELVRYLNTNPVGGLLEYARSHGFAAEFKLVDQSGPPHEPKFVYQAKVGGRWFPAVCAHSKKQGKQEAADAALRVLIGENEKAERMGFTEVTPVTGASLRRTMLLLSRSPEAQPKTLPLTGSTFHDQIAMLSHRCFNTLTNSFQPSLLGRKILAAIIMKKDSEDMGVVVSLGTGNRCVKGDSLSLKGETVNDCHAEIISRRGFIRFLYSELMKYNSQTAKDSIFEPAKGGEKLQIKKTVSFHLYISTAPCGDGALFDKSCSDRAMESTESRHYPVFENPKQGKLRTKVENGKGTIPVESFDIVPTWDGIRLGERLRTMSCSDKILRWNVLGLQGALLTHFLQPIYLKSVTLGYLFSQGHLTRAICCRVTRDGSAFEDGLRHPFIVNHPKVGRVSIYDSKRQSGKTKETSVNWCLADGYDLEILDGTRGTVDGPRNELSRVSKKNIFLLFKKLCSFRYRRDLLRLSYGEAKKAARDYETAKNYFKKGLKDMGYGNWISKPQEEKNFYLCPV

SEQ ID NO: 69 - protein, 1226 aa, Artificial Sequence
  ADAR Polypeptide Sequence
MNPRQGYSLSGYYTHPFQGYEHRQLRYQQPGPGSSPSSFLLKQIEFLKGQLPEAPVIGKQTPSLPPSLPGLRPRFPVLLASSTRGRQVDIRGVPRGVHLRSQGLQRGFQHPSPRGRSLPQRGVDCLSSHFQELSIYQDQEQRILKFLEELGEGKATTAHDLSGKLGTPKKEINRVLYSLAKKGKLQKEAGTPPLWKIAVSTQAWNQHSGVVRPDGHSQGAPNSDPSLEPEDRNSTSVSEDLLEPFIAVSAQAWNQHSGVVRPDSHSQGSPNSDPGLEPEDSNSTSALEDPLEFLDMAEIKEKICDYLFNVSDSSALNLAKNIGLTKARDINAVLIDMERQGDVYRQGTTPPIWHLTDKKRERMQIKRNTNSVPETAPAAIPETKRNAEFLTCNIPTSNASNNMVTTEKVENGQEPVIKLENRQEARPEPARLKPPVHYNGPSKAGYVDFENGQWATDDIPDDLNSIRAAPGEFRAIMEMPSFYSHGLPRCSPYKKLTECQLKNPISGLLEYAQFASQTCEFNMIEQSGPPHEPRFKFQVVINGREFPPAEAGSKKVAKQDAAMKAMTILLEEAKAKDSGKSEESSHYSTEKESEKTAESQTPTPSATSFFSGKSPVTTLLECMHKLGNSCEFRLLSKEGPAHEPKFQYCVAVGAQTFPSVSAPSKKVAKQMAAEEAMKALHGEATNSMASDNQPEGMISESLDNLESMMPNKVRKIGELVRYLNTNPVGGLLEYARSHGFAAEFKLVDQSGPPHEPKFVYQAKVGGRWFPAVCAHSKKQGKQEAADAALRVLIGENEKAERMGFTEVTPVTGASLRRTMLLLSRSPEAQPKTLPLTGSTFHDQIAMLSHRCFNTLTNSFQPSLLGRKILAAIIMKKDSEDMGVVVSLGTGNRCVKGDSLSLKGETVNDCHAEIISRRGFIRFLYSELMKYNSQTAKDSIFEPAKGGEKLQIKKTVSFHLYISTAPCGDGALFDKSCSDRAMESTESRHYPVFENPKQGKLRTKVENGNGTIPVESFDIVPTWDGIRLGERLRTMSCSDKILRWNVLGLQGALLTHFLQPIYLKSVTLGYLFSQGHLTRAICCRVTRDGSAFEDGLRHPFIVNHPKVGRVSIYDSKRQSGKTKETSVNWCLADGYDLEILDGTRGTVDGPRNELSRVSKKNIFLLFKKLCSFRYRRDLLRLSYGEAKKAARDYETAKNYFKKGLKDMGYGNWISKPQEEKNFYLCPV

SEQ ID NO: 70 - protein, 1226 aa, Artificial Sequence
  ADAR Polypeptide Sequence
MNPRQGYSLSGYYTHPFQGYEHRQLRYQQPGPGSSPSSFLLKQIEFLKGQLPEAPVIGKQTPSLPPSLPGLRPRFPVLLASSTRGRQVDIRGVPRGVHLRSQGLQRGFQHPSPRGRSLPQRGVDCLSSHFQELSIYQDQEQRILKFLEELGEGKATTAHDLSGKLGTPKKEINRVLYSLAKKGKLQKEAGTPPLWKIAVSTQAWNQHSGVVRPDGHSQGAPNSDPSLEPEDRNSTSVSEDLLEPFIAVSAQAWNQHSGVVRPDSHSQGSPNSDPGLEPEDSNSTSALEDPLEFLDMAEIKEKICDYLFNVSDSSALNLAKNIGLTKARDINAVLIDMERQGDVYRQGTTPPIWHLTDKKRERMQIKRNTNSVPETAPAAIPETKRNAEFLTCNIPTSNASNNMVTTEKVENGQEPVIKLENRQEARPEPARLKPPVHYNGPSKAGYVDFENGQWATDDIPDDLNSIRAAPGEFRAIMEMPSFYSHGLPRCSPYKKLTECQLKNPISGLLEYAQFASQTCEFNMIEQSGPPHEPRFKFQVVINGREFPPAEAGSKKVAKQDAAMKAMTILLEEAKAKDSGKSEESSHYSTEKESEKTAESQTPTPSATSFFSGKSPVTTLLECMHKLGNSCEFRLLSKEGPAHEPKFQYCVAVGAQTFPSVSAPSKKVAKQMAAEEAMKALHGEATNSMASDNQPEGMISESLDNLESMMPNKVRKIGELVRYLNTNPVGGLLEYARSHGFAAEFKLVDQSGPPHEPKFVYQAKVGGRWFPAVCAHSKKQGKQEAADAALRVLIGENEKAERMGFTEVTPVTGASLRRTMLLLSRSPEAQPKTLPLTGSTFHDQIAMLSHRCFNTLTNSFQPSLLGRKILAAIIMKKDSEDMGVVVSLGTGNRCVKGDSLSLKGETVNDCHAEIISRRGFIRFLYSELMKYNSQTAKDSIFEPAKGGEKLQIKKTVSFHLYISTAPCGDGALFDKSCSDRAMESTESRHYPVFENPKQGKLRTKVENGAGTIPVESFDIVPTWDGIRLGERLRTMSCSDKILRWNVLGLQGALLTHFLQPIYLKSVTLGYLFSQGHLTRAICCRVTRDGSAFEDGLRHPFIVNHPKVGRVSIYDSKRQSGKTKETSVNWCLADGYDLEILDGTRGTVDGPRNELSRVSKKNIFLLFKKLCSFRYRRDLLRLSYGEAKKAARDYETAKNYFKKGLKDMGYGNWISKPQEEKNFYLCPV

SEQ ID NO: 71 - protein, 1226 aa, Artificial Sequence
  ADAR Polypeptide Sequence
MNPRQGYSLSGYYTHPFQGYEHRQLRYQQPGPGSSPSSFLLKQIEFLKGQLPEAPVIGKQTPSLPPSLPGLRPRFPVLLASSTRGRQVDIRGVPRGVHLRSQGLQRGFQHPSPRGRSLPQRGVDCLSSHFQELSIYQDQEQRILKFLEELGEGKATTAHDLSGKLGTPKKEINRVLYSLAKKGKLQKEAGTPPLWKIAVSTQAWNQHSGVVRPDGHSQGAPNSDPSLEPEDRNSTSVSEDLLEPFIAVSAQAWNQHSGVVRPDSHSQGSPNSDPGLEPEDSNSTSALEDPLEFLDMAEIKEKICDYLFNVSDSSALNLAKNIGLTKARDINAVLIDMERQGDVYRQGTTPPIWHLTDKKRERMQIKRNTNSVPETAPAAIPETKRNAEFLTCNIPTSNASNNMVTTEKVENGQEPVIKLENRQEARPEPARLKPPVHYNGPSKAGYVDFENGQWATDDIPDDLNSIRAAPGEFRAIMEMPSFYSHGLPRCSPYKKLTECQLKNPISGLLEYAQFASQTCEFNMIEQSGPPHEPRFKFQVVINGREFPPAEAGSKKVAKQDAAMKAMTILLEEAKAKDSGKSEESSHYSTEKESEKTAESQTPTPSATSFFSGKSPVTTLLECMHKLGNSCEFRLLSKEGPAHEPKFQYCVAVGAQTFPSVSAPSKKVAKQMAAEEAMKALHGEATNSMASDNQPEGMISESLDNLESMMPNKVRKIGELVRYLNTNPVGGLLEYARSHGFAAEFKLVDQSGPPHEPKFVYQAKVGGRWFPAVCAHSKKQGKQEAADAALRVLIGENEKAERMGFTEVTPVTGASLRRTMLLLSRSPEAQPKTLPLTGSTFHDQIAMLSHRCFNTLTNSFQPSLLGRKILAAIIMKKDSEDMGVVVSLGTGNRCVKGDSLSLKGETVNDCHAEIISRRGFIRFLYSELMKYNSQTAKDSIFEPAKGGEKLQIKKTVSFHLYISTAPCGDGALFDKSCSDRAMESTESRHYPVFENPKQGKLRTKVENGMGTIPVESFDIVPTWDGIRLGERLRTMSCSDKILRWNVLGLQGALLTHFLQPIYLKSVTLGYLFSQGHLTRAICCRVTRDGSAFEDGLRHPFIVNHPKVGRVSIYDSKRQSGKTKETSVNWCLADGYDLEILDGTRGTVDGPRNELSRVSKKNIFLLFKKLCSFRYRRDLLRLSYGEAKKAARDYETAKNYFKKGLKDMGYGNWISKPQEEKNFYLCPV

SEQ ID NO: 72 - protein, 1226 aa, Artificial Sequence
  ADAR Polypeptide Sequence
MNPRQGYSLSGYYTHPFQGYEHRQLRYQQPGPGSSPSSFLLKQIEFLKGQLPEAPVIGKQTPSLPPSLPGLRPRFPVLLASSTRGRQVDIRGVPRGVHLRSQGLQRGFQHPSPRGRSLPQRGVDCLSSHFQELSIYQDQEQRILKFLEELGEGKATTAHDLSGKLGTPKKEINRVLYSLAKKGKLQKEAGTPPLWKIAVSTQAWNQHSGVVRPDGHSQGAPNSDPSLEPEDRNSTSVSEDLLEPFIAVSAQAWNQHSGVVRPDSHSQGSPNSDPGLEPEDSNSTSALEDPLEFLDMAEIKEKICDYLFNVSDSSALNLAKNIGLTKARDINAVLIDMERQGDVYRQGTTPPIWHLTDKKRERMQIKRNTNSVPETAPAAIPETKRNAEFLTCNIPTSNASNNMVTTEKVENGQEPVIKLENRQEARPEPARLKPPVHYNGPSKAGYVDFENGQWATDDIPDDLNSIRAAPGEFRAIMEMPSFYSHGLPRCSPYKKLTECQLKNPISGLLEYAQFASQTCEFNMIEQSGPPHEPRFKFQVVINGREFPPAEAGSKKVAKQDAAMKAMTILLEEAKAKDSGKSEESSHYSTEKESEKTAESQTPTPSATSFFSGKSPVTTLLECMHKLGNSCEFRLLSKEGPAHEPKFQYCVAVGAQTFPSVSAPSKKVAKQMAAEEAMKALHGEATNSMASDNQPEGMISESLDNLESMMPNKVRKIGELVRYLNTNPVGGLLEYARSHGFAAEFKLVDQSGPPHEPKFVYQAKVGGRWFPAVCAHSKKQGKQEAADAALRVLIGENEKAERMGFTEVTPVTGASLRRTMLLLSRSPEAQPKTLPLTGSTFHDQIAMLSHRCFNTLTNSFQPSLLGRKILAAIIMKKDSEDMGVVVSLGTGNRCVKGDSLSLKGETVNDCHAEIISRRGFIRFLYSELMKYNSQTAKDSIFEPAKGGEKLQIKKTVSFHLYISTAPCGDGALFDKSCSDRAMESTESRHYPVFENPKQGKLRTKVENGSGTIPVESFDIVPTWDGIRLGERLRTMSCSDKILRWNVLGLQGALLTHFLQPIYLKSVTLGYLFSQGHLTRAICCRVTRDGSAFEDGLRHPFIVNHPKVGRVSIYDSKRQSGKTKETSVNWCLADGYDLEILDGTRGTVDGPRNELSRVSKKNIFLLFKKLCSFRYRRDLLRLSYGEAKKAARDYETAKNYFKKGLKDMGYGNWISKPQEEKNFYLCPV

SEQ ID NO: 73 - protein, 1226 aa, Artificial Sequence
  ADAR Polypeptide Sequence
MNPRQGYSLSGYYTHPFQGYEHRQLRYQQPGPGSSPSSFLLKQIEFLKGQLPEAPVIGKQTPSLPPSLPGLRPRFPVLLASSTRGRQVDIRGVPRGVHLRSQGLQRGFQHPSPRGRSLPQRGVDCLSSHFQELSIYQDQEQRILKFLEELGEGKATTAHDLSGKLGTPKKEINRVLYSLAKKGKLQKEAGTPPLWKIAVSTQAWNQHSGVVRPDGHSQGAPNSDPSLEPEDRNSTSVSEDLLEPFIAVSAQAWNQHSGVVRPDSHSQGSPNSDPGLEPEDSNSTSALEDPLEFLDMAEIKEKICDYLFNVSDSSALNLAKNIGLTKARDINAVLIDMERQGDVYRQGTTPPIWHLTDKKRERMQIKRNTNSVPETAPAAIPETKRNAEFLTCNIPTSNASNNMVTTEKVENGQEPVIKLENRQEARPEPARLKPPVHYNGPSKAGYVDFENGQWATDDIPDDLNSIRAAPGEFRAIMEMPSFYSHGLPRCSPYKKLTECQLKNPISGLLEYAQFASQTCEFNMIEQSGPPHEPRFKFQVVINGREFPPAEAGSKKVAKQDAAMKAMTILLEEAKAKDSGKSEESSHYSTEKESEKTAESQTPTPSATSFFSGKSPVTTLLECMHKLGNSCEFRLLSKEGPAHEPKFQYCVAVGAQTFPSVSAPSKKVAKQMAAEEAMKALHGEATNSMASDNQPEGMISESLDNLESMMPNKVRKIGELVRYLNTNPVGGLLEYARSHGFAAEFKLVDQSGPPHEPKFVYQAKVGGRWFPAVCAHSKKQGKQEAADAALRVLIGENEKAERMGFTEVTPVTGASLRRTMLLLSRSPEAQPKTLPLTGSTFHDQIAMLSHRCFNTLTNSFQPSLLGRKILAAIIMKKDSEDMGVVVSLGTGNRCVKGDSLSLKGETVNDCHAEIISRRGFIRFLYSELMKYNSQTAKDSIFEPAKGGEKLQIKKTVSFHLYISTAPCGDGALFDKSCSDRAMESTESRHYPVFENPKQGKLRTKVENGFGTIPVESFDIVPTWDGIRLGERLRTMSCSDKILRWNVLGLQGALLTHFLQPIYLKSVTLGYLFSQGHLTRAICCRVTRDGSAFEDGLRHPFIVNHPKVGRVSIYDSKRQSGKTKETSVNWCLADGYDLEILDGTRGTVDGPRNELSRVSKKNIFLLFKKLCSFRYRRDLLRLSYGEAKKAARDYETAKNYFKKGLKDMGYGNWISKPQEEKNFYLCPV

SEQ ID NO: 74 - protein, 1226 aa, Artificial Sequence
  ADAR Polypeptide Sequence
MNPRQGYSLSGYYTHPFQGYEHRQLRYQQPGPGSSPSSFLLKQIEFLKGQLPEAPVIGKQTPSLPPSLPGLRPRFPVLLASSTRGRQVDIRGVPRGVHLRSQGLQRGFQHPSPRGRSLPQRGVDCLSSHFQELSIYQDQEQRILKFLEELGEGKATTAHDLSGKLGTPKKEINRVLYSLAKKGKLQKEAGTPPLWKIAVSTQAWNQHSGVVRPDGHSQGAPNSDPSLEPEDRNSTSVSEDLLEPFIAVSAQAWNQHSGVVRPDSHSQGSPNSDPGLEPEDSNSTSALEDPLEFLDMAEIKEKICDYLFNVSDSSALNLAKNIGLTKARDINAVLIDMERQGDVYRQGTTPPIWHLTDKKRERMQIKRNTNSVPETAPAAIPETKRNAEFLTCNIPTSNASNNMVTTEKVENGQEPVIKLENRQEARPEPARLKPPVHYNGPSKAGYVDFENGQWATDDIPDDLNSIRAAPGEFRAIMEMPSFYSHGLPRCSPYKKLTECQLKNPISGLLEYAQFASQTCEFNMIEQSGPPHEPRFKFQVVINGREFPPAEAGSKKVAKQDAAMKAMTILLEEAKAKDSGKSEESSHYSTEKESEKTAESQTPTPSATSFFSGKSPVTTLLECMHKLGNSCEFRLLSKEGPAHEPKFQYCVAVGAQTFPSVSAPSKKVAKQMAAEEAMKALHGEATNSMASDNQPEGMISESLDNLESMMPNKVRKIGELVRYLNTNPVGGLLEYARSHGFAAEFKLVDQSGPPHEPKFVYQAKVGGRWFPAVCAHSKKQGKQEAADAALRVLIGENEKAERMGFTEVTPVTGASLRRTMLLLSRSPEAQPKTLPLTGSTFHDQIAMLSHRCFNTLTNSFQPSLLGRKILAAIIMKKDSEDMGVVVSLGTGNRCVKGDSLSLKGETVNDCHAEIISRRGFIRFLYSELMKYNSQTAKDSIFEPAKGGEKLQIKKTVSFHLYISTAPCGDGALFDKSCSDRAMESTESRHYPVFENPKQGKLRTKVENGLGTIPVESFDIVPTWDGIRLGERLRTMSCSDKILRWNVLGLQGALLTHFLQPIYLKSVTLGYLFSQGHLTRAICCRVTRDGSAFEDGLRHPFIVNHPKVGRVSIYDSKRQSGKTKETSVNWCLADGYDLEILDGTRGTVDGPRNELSRVSKKNIFLLFKKLCSFRYRRDLLRLSYGEAKKAARDYETAKNYFKKGLKDMGYGNWISKPQEEKNFYLCPV

SEQ ID NO: 75 - protein, 1226 aa, Artificial Sequence
  ADAR Polypeptide Sequence
MNPRQGYSLSGYYTHPFQGYEHRQLRYQQPGPGSSPSSFLLKQIEFLKGQLPEAPVIGKQTPSLPPSLPGLRPRFPVLLASSTRGRQVDIRGVPRGVHLRSQGLQRGFQHPSPRGRSLPQRGVDCLSSHFQELSIYQDQEQRILKFLEELGEGKATTAHDLSGKLGTPKKEINRVLYSLAKKGKLQKEAGTPPLWKIAVSTQAWNQHSGVVRPDGHSQGAPNSDPSLEPEDRNSTSVSEDLLEPFIAVSAQAWNQHSGVVRPDSHSQGSPNSDPGLEPEDSNSTSALEDPLEFLDMAEIKEKICDYLFNVSDSSALNLAKNIGLTKARDINAVLIDMERQGDVYRQGTTPPIWHLTDKKRERMQIKRNTNSVPETAPAAIPETKRNAEFLTCNIPTSNASNNMVTTEKVENGQEPVIKLENRQEARPEPARLKPPVHYNGPSKAGYVDFENGQWATDDIPDDLNSIRAAPGEFRAIMEMPSFYSHGLPRCSPYKKLTECQLKNPISGLLEYAQFASQTCEFNMIEQSGPPHEPRFKFQVVINGREFPPAEAGSKKVAKQDAAMKAMTILLEEAKAKDSGKSEESSHYSTEKESEKTAESQTPTPSATSFFSGKSPVTTLLECMHKLGNSCEFRLLSKEGPAHEPKFQYCVAVGAQTFPSVSAPSKKVAKQMAAEEAMKALHGEATNSMASDNQPEGMISESLDNLESMMPNKVRKIGELVRYLNTNPVGGLLEYARSHGFAAEFKLVDQSGPPHEPKFVYQAKVGGRWFPAVCAHSKKQGKQEAADAALRVLIGENEKAERMGFTEVTPVTGASLRRTMLLLSRSPEAQPKTLPLTGSTFHDQIAMLSHRCFNTLTNSFQPSLLGRKILAAIIMKKDSEDMGVVVSLGTGNRCVKGDSLSLKGETVNDCHAEIISRRGFIRFLYSELMKYNSQTAKDSIFEPAKGGEKLQIKKTVSFHLYISTAPCGDGALFDKSCSDRAMESTESRHYPVFENPKQGKLRTKVENGWGTIPVESFDIVPTWDGIRLGERLRTMSCSDKILRWNVLGLQGALLTHFLQPIYLKSVTLGYLFSQGHLTRAICCRVTRDGSAFEDGLRHPFIVNHPKVGRVSIYDSKRQSGKTKETSVNWCLADGYDLEILDGTRGTVDGPRNELSRVSKKNIFLLFKKLCSFRYRRDLLRLSYGEAKKAARDYETAKNYFKKGLKDMGYGNWISKPQEEKNFYLCPV

SEQ ID NO: 76 - protein, 1226 aa, Artificial Sequence
  ADAR Polypeptide Sequence
MNPRQGYSLSGYYTHPFQGYEHRQLRYQQPGPGSSPSSFLLKQIEFLKGQLPEAPVIGKQTPSLPPSLPGLRPRFPVLLASSTRGRQVDIRGVPRGVHLRSQGLQRGFQHPSPRGRSLPQRGVDCLSSHFQELSIYQDQEQRILKFLEELGEGKATTAHDLSGKLGTPKKEINRVLYSLAKKGKLQKEAGTPPLWKIAVSTQAWNQHSGVVRPDGHSQGAPNSDPSLEPEDRNSTSVSEDLLEPFIAVSAQAWNQHSGVVRPDSHSQGSPNSDPGLEPEDSNSTSALEDPLEFLDMAEIKEKICDYLFNVSDSSALNLAKNIGLTKARDINAVLIDMERQGDVYRQGTTPPIWHLTDKKRERMQIKRNTNSVPETAPAAIPETKRNAEFLTCNIPTSNASNNMVTTEKVENGQEPVIKLENRQEARPEPARLKPPVHYNGPSKAGYVDFENGQWATDDIPDDLNSIRAAPGEFRAIMEMPSFYSHGLPRCSPYKKLTECQLKNPISGLLEYAQFASQTCEFNMIEQSGPPHEPRFKFQVVINGREFPPAEAGSKKVAKQDAAMKAMTILLEEAKAKDSGKSEESSHYSTEKESEKTAESQTPTPSATSFFSGKSPVTTLLECMHKLGNSCEFRLLSKEGPAHEPKFQYCVAVGAQTFPSVSAPSKKVAKQMAAEEAMKALHGEATNSMASDNQPEGMISESLDNLESMMPNKVRKIGELVRYLNTNPVGGLLEYARSHGFAAEFKLVDQSGPPHEPKFVYQAKVGGRWFPAVCAHSKKQGKQEAADAALRVLIGENEKAERMGFTEVTPVTGASLRRTMLLLSRSPEAQPKTLPLTGSTFHDQIAMLSHRCFNTLTNSFQPSLLGRKILAAIIMKKDSEDMGVVVSLGTGNRCVKGDSLSLKGETVNDCHAEIISRRGFIRFLYSELMKYNSQTAKDSIFEPAKGGEKLQIKKTVSFHLYISTAPCGDGALFDKSCSDRAMESTESRHYPVFENPKQGKLRTKVENGEGTIPVESYDIVPTWDGIRLGERLRTMSCSDKILRWNVLGLQGALLTHFLQPIYLKSVTLGYLFSQGHLTRAICCRVTRDGSAFEDGLRHPFIVNHPKVGRVSIYDSKRQSGKTKETSVNWCLADGYDLEILDGTRGTVDGPRNELSRVSKKNIFLLFKKLCSFRYRRDLLRLSYGEAKKAARDYETAKNYFKKGLKDMGYGNWISKPQEEKNFYLCPV

SEQ ID NO: 77 - protein, 1226 aa, Artificial Sequence
  ADAR Polypeptide Sequence
MNPRQGYSLSGYYTHPFQGYEHRQLRYQQPGPGSSPSSFLLKQIEFLKGQLPEAPVIGKQTPSLPPSLPGLRPRFPVLLASSTRGRQVDIRGVPRGVHLRSQGLQRGFQHPSPRGRSLPQRGVDCLSSHFQELSIYQDQEQRILKFLEELGEGKATTAHDLSGKLGTPKKEINRVLYSLAKKGKLQKEAGTPPLWKIAVSTQAWNQHSGVVRPDGHSQGAPNSDPSLEPEDRNSTSVSEDLLEPFIAVSAQAWNQHSGVVRPDSHSQGSPNSDPGLEPEDSNSTSALEDPLEFLDMAEIKEKICDYLFNVSDSSALNLAKNIGLTKARDINAVLIDMERQGDVYRQGTTPPIWHLTDKKRERMQIKRNTNSVPETAPAAIPETKRNAEFLTCNIPTSNASNNMVTTEKVENGQEPVIKLENRQEARPEPARLKPPVHYNGPSKAGYVDFENGQWATDDIPDDLNSIRAAPGEFRAIMEMPSFYSHGLPRCSPYKKLTECQLKNPISGLLEYAQFASQTCEFNMIEQSGPPHEPRFKFQVVINGREFPPAEAGSKKVAKQDAAMKAMTILLEEAKAKDSGKSEESSHYSTEKESEKTAESQTPTPSATSFFSGKSPVTTLLECMHKLGNSCEFRLLSKEGPAHEPKFQYCVAVGAQTFPSVSAPSKKVAKQMAAEEAMKALHGEATNSMASDNQPEGMISESLDNLESMMPNKVRKIGELVRYLNTNPVGGLLEYARSHGFAAEFKLVDQSGPPHEPKFVYQAKVGGRWFPAVCAHSKKQGKQEAADAALRVLIGENEKAERMGFTEVTPVTGASLRRTMLLLSRSPEAQPKTLPLTGSTFHDQIAMLSHRCFNTLTNSFQPSLLGRKILAAIIMKKDSEDMGVVVSLGTGNRCVKGDSLSLKGETVNDCHAEIISRRGFIRFLYSELMKYNSQTAKDSIFEPAKGGEKLQIKKTVSFHLYISTAPCGDGALFDKSCSDRAMESTESRHYPVFENPKQGKLRTKVENGQGTIPVESYDIVPTWDGIRLGERLRTMSCSDKILRWNVLGLQGALLTHFLQPIYLKSVTLGYLFSQGHLTRAICCRVTRDGSAFEDGLRHPFIVNHPKVGRVSIYDSKRQSGKTKETSVNWCLADGYDLEILDGTRGTVDGPRNELSRVSKKNIFLLFKKLCSFRYRRDLLRLSYGEAKKAARDYETAKNYFKKGLKDMGYGNWISKPQEEKNFYLCPV

SEQ ID NO: 78 - protein, 1226 aa, Artificial Sequence
  ADAR Polypeptide Sequence
MNPRQGYSLSGYYTHPFQGYEHRQLRYQQPGPGSSPSSFLLKQIEFLKGQLPEAPVIGKQTPSLPPSLPGLRPRFPVLLASSTRGRQVDIRGVPRGVHLRSQGLQRGFQHPSPRGRSLPQRGVDCLSSHFQELSIYQDQEQRILKFLEELGEGKATTAHDLSGKLGTPKKEINRVLYSLAKKGKLQKEAGTPPLWKIAVSTQAWNQHSGVVRPDGHSQGAPNSDPSLEPEDRNSTSVSEDLLEPFIAVSAQAWNQHSGVVRPDSHSQGSPNSDPGLEPEDSNSTSALEDPLEFLDMAEIKEKICDYLFNVSDSSALNLAKNIGLTKARDINAVLIDMERQGDVYRQGTTPPIWHLTDKKRERMQIKRNTNSVPETAPAAIPETKRNAEFLTCNIPTSNASNNMVTTEKVENGQEPVIKLENRQEARPEPARLKPPVHYNGPSKAGYVDFENGQWATDDIPDDLNSIRAAPGEFRAIMEMPSFYSHGLPRCSPYKKLTECQLKNPISGLLEYAQFASQTCEFNMIEQSGPPHEPRFKFQVVINGREFPPAEAGSKKVAKQDAAMKAMTILLEEAKAKDSGKSEESSHYSTEKESEKTAESQTPTPSATSFFSGKSPVTTLLECMHKLGNSCEFRLLSKEGPAHEPKFQYCVAVGAQTFPSVSAPSKKVAKQMAAEEAMKALHGEATNSMASDNQPEGMISESLDNLESMMPNKVRKIGELVRYLNTNPVGGLLEYARSHGFAAEFKLVDQSGPPHEPKFVYQAKVGGRWFPAVCAHSKKQGKQEAADAALRVLIGENEKAERMGFTEVTPVTGASLRRTMLLLSRSPEAQPKTLPLTGSTFHDQIAMLSHRCFNTLTNSFQPSLLGRKILAAIIMKKDSEDMGVVVSLGTGNRCVKGDSLSLKGETVNDCHAEIISRRGFIRFLYSELMKYNSQTAKDSIFEPAKGGEKLQIKKTVSFHLYISTAPCGDGALFDKSCSDRAMESTESRHYPVFENPKQGKLRTKVENGHGTIPVESYDIVPTWDGIRLGERLRTMSCSDKILRWNVLGLQGALLTHFLQPIYLKSVTLGYLFSQGHLTRAICCRVTRDGSAFEDGLRHPFIVNHPKVGRVSIYDSKRQSGKTKETSVNWCLADGYDLEILDGTRGTVDGPRNELSRVSKKNIFLLFKKLCSFRYRRDLLRLSYGEAKKAARDYETAKNYFKKGLKDMGYGNWISKPQEEKNFYLCPV

SEQ ID NO: 79 - protein, 1226 aa, Artificial Sequence
  ADAR Polypeptide Sequence
MNPRQGYSLSGYYTHPFQGYEHRQLRYQQPGPGSSPSSFLLKQIEFLKGQLPEAPVIGKQTPSLPPSLPGLRPRFPVLLASSTRGRQVDIRGVPRGVHLRSQGLQRGFQHPSPRGRSLPQRGVDCLSSHFQELSIYQDQEQRILKFLEELGEGKATTAHDLSGKLGTPKKEINRVLYSLAKKGKLQKEAGTPPLWKIAVSTQAWNQHSGVVRPDGHSQGAPNSDPSLEPEDRNSTSVSEDLLEPFIAVSAQAWNQHSGVVRPDSHSQGSPNSDPGLEPEDSNSTSALEDPLEFLDMAEIKEKICDYLFNVSDSSALNLAKNIGLTKARDINAVLIDMERQGDVYRQGTTPPIWHLTDKKRERMQIKRNTNSVPETAPAAIPETKRNAEFLTCNIPTSNASNNMVTTEKVENGQEPVIKLENRQEARPEPARLKPPVHYNGPSKAGYVDFENGQWATDDIPDDLNSIRAAPGEFRAIMEMPSFYSHGLPRCSPYKKLTECQLKNPISGLLEYAQFASQTCEFNMIEQSGPPHEPRFKFQVVINGREFPPAEAGSKKVAKQDAAMKAMTILLEEAKAKDSGKSEESSHYSTEKESEKTAESQTPTPSATSFFSGKSPVTTLLECMHKLGNSCEFRLLSKEGPAHEPKFQYCVAVGAQTFPSVSAPSKKVAKQMAAEEAMKALHGEATNSMASDNQPEGMISESLDNLESMMPNKVRKIGELVRYLNTNPVGGLLEYARSHGFAAEFKLVDQSGPPHEPKFVYQAKVGGRWFPAVCAHSKKQGKQEAADAALRVLIGENEKAERMGFTEVTPVTGASLRRTMLLLSRSPEAQPKTLPLTGSTFHDQIAMLSHRCFNTLTNSFQPSLLGRKILAAIIMKKDSEDMGVVVSLGTGNRCVKGDSLSLKGETVNDCHAEIISRRGFIRFLYSELMKYNSQTAKDSIFEPAKGGEKLQIKKTVSFHLYISTAPCGDGALFDKSCSDRAMESTESRHYPVFENPKQGKLRTKVENGRGTIPVESYDIVPTWDGIRLGERLRTMSCSDKILRWNVLGLQGALLTHFLQPIYLKSVTLGYLFSQGHLTRAICCRVTRDGSAFEDGLRHPFIVNHPKVGRVSIYDSKRQSGKTKETSVNWCLADGYDLEILDGTRGTVDGPRNELSRVSKKNIFLLFKKLCSFRYRRDLLRLSYGEAKKAARDYETAKNYFKKGLKDMGYGNWISKPQEEKNFYLCPV

SEQ ID NO: 80 - protein, 1226 aa, Artificial Sequence
  ADAR Polypeptide Sequence
MNPRQGYSLSGYYTHPFQGYEHRQLRYQQPGPGSSPSSFLLKQIEFLKGQLPEAPVIGKQTPSLPPSLPGLRPRFPVLLASSTRGRQVDIRGVPRGVHLRSQGLQRGFQHPSPRGRSLPQRGVDCLSSHFQELSIYQDQEQRILKFLEELGEGKATTAHDLSGKLGTPKKEINRVLYSLAKKGKLQKEAGTPPLWKIAVSTQAWNQHSGVVRPDGHSQGAPNSDPSLEPEDRNSTSVSEDLLEPFIAVSAQAWNQHSGVVRPDSHSQGSPNSDPGLEPEDSNSTSALEDPLEFLDMAEIKEKICDYLFNVSDSSALNLAKNIGLTKARDINAVLIDMERQGDVYRQGTTPPIWHLTDKKRERMQIKRNTNSVPETAPAAIPETKRNAEFLTCNIPTSNASNNMVTTEKVENGQEPVIKLENRQEARPEPARLKPPVHYNGPSKAGYVDFENGQWATDDIPDDLNSIRAAPGEFRAIMEMPSFYSHGLPRCSPYKKLTECQLKNPISGLLEYAQFASQTCEFNMIEQSGPPHEPRFKFQVVINGREFPPAEAGSKKVAKQDAAMKAMTILLEEAKAKDSGKSEESSHYSTEKESEKTAESQTPTPSATSFFSGKSPVTTLLECMHKLGNSCEFRLLSKEGPAHEPKFQYCVAVGAQTFPSVSAPSKKVAKQMAAEEAMKALHGEATNSMASDNQPEGMISESLDNLESMMPNKVRKIGELVRYLNTNPVGGLLEYARSHGFAAEFKLVDQSGPPHEPKFVYQAKVGGRWFPAVCAHSKKQGKQEAADAALRVLIGENEKAERMGFTEVTPVTGASLRRTMLLLSRSPEAQPKTLPLTGSTFHDQIAMLSHRCFNTLTNSFQPSLLGRKILAAIIMKKDSEDMGVVVSLGTGNRCVKGDSLSLKGETVNDCHAEIISRRGFIRFLYSELMKYNSQTAKDSIFEPAKGGEKLQIKKTVSFHLYISTAPCGDGALFDKSCSDRAMESTESRHYPVFENPKQGKLRTKVENGKGTIPVESYDIVPTWDGIRLGERLRTMSCSDKILRWNVLGLQGALLTHFLQPIYLKSVTLGYLFSQGHLTRAICCRVTRDGSAFEDGLRHPFIVNHPKVGRVSIYDSKRQSGKTKETSVNWCLADGYDLEILDGTRGTVDGPRNELSRVSKKNIFLLFKKLCSFRYRRDLLRLSYGEAKKAARDYETAKNYFKKGLKDMGYGNWISKPQEEKNFYLCPV

SEQ ID NO: 81 - protein, 1226 aa, Artificial Sequence
  ADAR Polypeptide Sequence
MNPRQGYSLSGYYTHPFQGYEHRQLRYQQPGPGSSPSSFLLKQIEFLKGQLPEAPVIGKQTPSLPPSLPGLRPRFPVLLASSTRGRQVDIRGVPRGVHLRSQGLQRGFQHPSPRGRSLPQRGVDCLSSHFQELSIYQDQEQRILKFLEELGEGKATTAHDLSGKLGTPKKEINRVLYSLAKKGKLQKEAGTPPLWKIAVSTQAWNQHSGVVRPDGHSQGAPNSDPSLEPEDRNSTSVSEDLLEPFIAVSAQAWNQHSGVVRPDSHSQGSPNSDPGLEPEDSNSTSALEDPLEFLDMAEIKEKICDYLFNVSDSSALNLAKNIGLTKARDINAVLIDMERQGDVYRQGTTPPIWHLTDKKRERMQIKRNTNSVPETAPAAIPETKRNAEFLTCNIPTSNASNNMVTTEKVENGQEPVIKLENRQEARPEPARLKPPVHYNGPSKAGYVDFENGQWATDDIPDDLNSIRAAPGEFRAIMEMPSFYSHGLPRCSPYKKLTECQLKNPISGLLEYAQFASQTCEFNMIEQSGPPHEPRFKFQVVINGREFPPAEAGSKKVAKQDAAMKAMTILLEEAKAKDSGKSEESSHYSTEKESEKTAESQTPTPSATSFFSGKSPVTTLLECMHKLGNSCEFRLLSKEGPAHEPKFQYCVAVGAQTFPSVSAPSKKVAKQMAAEEAMKALHGEATNSMASDNQPEGMISESLDNLESMMPNKVRKIGELVRYLNTNPVGGLLEYARSHGFAAEFKLVDQSGPPHEPKFVYQAKVGGRWFPAVCAHSKKQGKQEAADAALRVLIGENEKAERMGFTEVTPVTGASLRRTMLLLSRSPEAQPKTLPLTGSTFHDQIAMLSHRCFNTLTNSFQPSLLGRKILAAIIMKKDSEDMGVVVSLGTGNRCVKGDSLSLKGETVNDCHAEIISRRGFIRFLYSELMKYNSQTAKDSIFEPAKGGEKLQIKKTVSFHLYISTAPCGDGALFDKSCSDRAMESTESRHYPVFENPKQGKLRTKVENGNGTIPVESYDIVPTWDGIRLGERLRTMSCSDKILRWNVLGLQGALLTHFLQPIYLKSVTLGYLFSQGHLTRAICCRVTRDGSAFEDGLRHPFIVNHPKVGRVSIYDSKRQSGKTKETSVNWCLADGYDLEILDGTRGTVDGPRNELSRVSKKNIFLLFKKLCSFRYRRDLLRLSYGEAKKAARDYETAKNYFKKGLKDMGYGNWISKPQEEKNFYLCPV

SEQ ID NO: 82 - protein, 1226 aa, Artificial Sequence
  ADAR Polypeptide Sequence
MNPRQGYSLSGYYTHPFQGYEHRQLRYQQPGPGSSPSSFLLKQIEFLKGQLPEAPVIGKQTPSLPPSLPGLRPRFPVLLASSTRGRQVDIRGVPRGVHLRSQGLQRGFQHPSPRGRSLPQRGVDCLSSHFQELSIYQDQEQRILKFLEELGEGKATTAHDLSGKLGTPKKEINRVLYSLAKKGKLQKEAGTPPLWKIAVSTQAWNQHSGVVRPDGHSQGAPNSDPSLEPEDRNSTSVSEDLLEPFIAVSAQAWNQHSGVVRPDSHSQGSPNSDPGLEPEDSNSTSALEDPLEFLDMAEIKEKICDYLFNVSDSSALNLAKNIGLTKARDINAVLIDMERQGDVYRQGTTPPIWHLTDKKRERMQIKRNTNSVPETAPAAIPETKRNAEFLTCNIPTSNASNNMVTTEKVENGQEPVIKLENRQEARPEPARLKPPVHYNGPSKAGYVDFENGQWATDDIPDDLNSIRAAPGEFRAIMEMPSFYSHGLPRCSPYKKLTECQLKNPISGLLEYAQFASQTCEFNMIEQSGPPHEPRFKFQVVINGREFPPAEAGSKKVAKQDAAMKAMTILLEEAKAKDSGKSEESSHYSTEKESEKTAESQTPTPSATSFFSGKSPVTTLLECMHKLGNSCEFRLLSKEGPAHEPKFQYCVAVGAQTFPSVSAPSKKVAKQMAAEEAMKALHGEATNSMASDNQPEGMISESLDNLESMMPNKVRKIGELVRYLNTNPVGGLLEYARSHGFAAEFKLVDQSGPPHEPKFVYQAKVGGRWFPAVCAHSKKQGKQEAADAALRVLIGENEKAERMGFTEVTPVTGASLRRTMLLLSRSPEAQPKTLPLTGSTFHDQIAMLSHRCFNTLTNSFQPSLLGRKILAAIIMKKDSEDMGVVVSLGTGNRCVKGDSLSLKGETVNDCHAEIISRRGFIRFLYSELMKYNSQTAKDSIFEPAKGGEKLQIKKTVSFHLYISTAPCGDGALFDKSCSDRAMESTESRHYPVFENPKQGKLRTKVENGAGTIPVESYDIVPTWDGIRLGERLRTMSCSDKILRWNVLGLQGALLTHFLQPIYLKSVTLGYLFSQGHLTRAICCRVTRDGSAFEDGLRHPFIVNHPKVGRVSIYDSKRQSGKTKETSVNWCLADGYDLEILDGTRGTVDGPRNELSRVSKKNIFLLFKKLCSFRYRRDLLRLSYGEAKKAARDYETAKNYFKKGLKDMGYGNWISKPQEEKNFYLCPV

SEQ ID NO: 83 - protein, 1226 aa, Artificial Sequence
  ADAR Polypeptide Sequence
MNPRQGYSLSGYYTHPFQGYEHRQLRYQQPGPGSSPSSFLLKQIEFLKGQLPEAPVIGKQTPSLPPSLPGLRPRFPVLLASSTRGRQVDIRGVPRGVHLRSQGLQRGFQHPSPRGRSLPQRGVDCLSSHFQELSIYQDQEQRILKFLEELGEGKATTAHDLSGKLGTPKKEINRVLYSLAKKGKLQKEAGTPPLWKIAVSTQAWNQHSGVVRPDGHSQGAPNSDPSLEPEDRNSTSVSEDLLEPFIAVSAQAWNQHSGVVRPDSHSQGSPNSDPGLEPEDSNSTSALEDPLEFLDMAEIKEKICDYLFNVSDSSALNLAKNIGLTKARDINAVLIDMERQGDVYRQGTTPPIWHLTDKKRERMQIKRNTNSVPETAPAAIPETKRNAEFLTCNIPTSNASNNMVTTEKVENGQEPVIKLENRQEARPEPARLKPPVHYNGPSKAGYVDFENGQWATDDIPDDLNSIRAAPGEFRAIMEMPSFYSHGLPRCSPYKKLTECQLKNPISGLLEYAQFASQTCEFNMIEQSGPPHEPRFKFQVVINGREFPPAEAGSKKVAKQDAAMKAMTILLEEAKAKDSGKSEESSHYSTEKESEKTAESQTPTPSATSFFSGKSPVTTLLECMHKLGNSCEFRLLSKEGPAHEPKFQYCVAVGAQTFPSVSAPSKKVAKQMAAEEAMKALHGEATNSMASDNQPEGMISESLDNLESMMPNKVRKIGELVRYLNTNPVGGLLEYARSHGFAAEFKLVDQSGPPHEPKFVYQAKVGGRWFPAVCAHSKKQGKQEAADAALRVLIGENEKAERMGFTEVTPVTGASLRRTMLLLSRSPEAQPKTLPLTGSTFHDQIAMLSHRCFNTLTNSFQPSLLGRKILAAIIMKKDSEDMGVVVSLGTGNRCVKGDSLSLKGETVNDCHAEIISRRGFIRFLYSELMKYNSQTAKDSIFEPAKGGEKLQIKKTVSFHLYISTAPCGDGALFDKSCSDRAMESTESRHYPVFENPKQGKLRTKVENGMGTIPVESYDIVPTWDGIRLGERLRTMSCSDKILRWNVLGLQGALLTHFLQPIYLKSVTLGYLFSQGHLTRAICCRVTRDGSAFEDGLRHPFIVNHPKVGRVSIYDSKRQSGKTKETSVNWCLADGYDLEILDGTRGTVDGPRNELSRVSKKNIFLLFKKLCSFRYRRDLLRLSYGEAKKAARDYETAKNYFKKGLKDMGYGNWISKPQEEKNFYLCPV

SEQ ID NO: 84 - protein, 1226 aa, Artificial Sequence
  ADAR Polypeptide Sequence
MNPRQGYSLSGYYTHPFQGYEHRQLRYQQPGPGSSPSSFLLKQIEFLKGQLPEAPVIGKQTPSLPPSLPGLRPRFPVLLASSTRGRQVDIRGVPRGVHLRSQGLQRGFQHPSPRGRSLPQRGVDCLSSHFQELSIYQDQEQRILKFLEELGEGKATTAHDLSGKLGTPKKEINRVLYSLAKKGKLQKEAGTPPLWKIAVSTQAWNQHSGVVRPDGHSQGAPNSDPSLEPEDRNSTSVSEDLLEPFIAVSAQAWNQHSGVVRPDSHSQGSPNSDPGLEPEDSNSTSALEDPLEFLDMAEIKEKICDYLFNVSDSSALNLAKNIGLTKARDINAVLIDMERQGDVYRQGTTPPIWHLTDKKRERMQIKRNTNSVPETAPAAIPETKRNAEFLTCNIPTSNASNNMVTTEKVENGQEPVIKLENRQEARPEPARLKPPVHYNGPSKAGYVDFENGQWATDDIPDDLNSIRAAPGEFRAIMEMPSFYSHGLPRCSPYKKLTECQLKNPISGLLEYAQFASQTCEFNMIEQSGPPHEPRFKFQVVINGREFPPAEAGSKKVAKQDAAMKAMTILLEEAKAKDSGKSEESSHYSTEKESEKTAESQTPTPSATSFFSGKSPVTTLLECMHKLGNSCEFRLLSKEGPAHEPKFQYCVAVGAQTFPSVSAPSKKVAKQMAAEEAMKALHGEATNSMASDNQPEGMISESLDNLESMMPNKVRKIGELVRYLNTNPVGGLLEYARSHGFAAEFKLVDQSGPPHEPKFVYQAKVGGRWFPAVCAHSKKQGKQEAADAALRVLIGENEKAERMGFTEVTPVTGASLRRTMLLLSRSPEAQPKTLPLTGSTFHDQIAMLSHRCFNTLTNSFQPSLLGRKILAAIIMKKDSEDMGVVVSLGTGNRCVKGDSLSLKGETVNDCHAEIISRRGFIRFLYSELMKYNSQTAKDSIFEPAKGGEKLQIKKTVSFHLYISTAPCGDGALFDKSCSDRAMESTESRHYPVFENPKQGKLRTKVENGSGTIPVESYDIVPTWDGIRLGERLRTMSCSDKILRWNVLGLQGALLTHFLQPIYLKSVTLGYLFSQGHLTRAICCRVTRDGSAFEDGLRHPFIVNHPKVGRVSIYDSKRQSGKTKETSVNWCLADGYDLEILDGTRGTVDGPRNELSRVSKKNIFLLFKKLCSFRYRRDLLRLSYGEAKKAARDYETAKNYFKKGLKDMGYGNWISKPQEEKNFYLCPV

SEQ ID NO: 85 - protein, 1226 aa, Artificial Sequence
  ADAR Polypeptide Sequence
MNPRQGYSLSGYYTHPFQGYEHRQLRYQQPGPGSSPSSFLLKQIEFLKGQLPEAPVIGKQTPSLPPSLPGLRPRFPVLLASSTRGRQVDIRGVPRGVHLRSQGLQRGFQHPSPRGRSLPQRGVDCLSSHFQELSIYQDQEQRILKFLEELGEGKATTAHDLSGKLGTPKKEINRVLYSLAKKGKLQKEAGTPPLWKIAVSTQAWNQHSGVVRPDGHSQGAPNSDPSLEPEDRNSTSVSEDLLEPFIAVSAQAWNQHSGVVRPDSHSQGSPNSDPGLEPEDSNSTSALEDPLEFLDMAEIKEKICDYLFNVSDSSALNLAKNIGLTKARDINAVLIDMERQGDVYRQGTTPPIWHLTDKKRERMQIKRNTNSVPETAPAAIPETKRNAEFLTCNIPTSNASNNMVTTEKVENGQEPVIKLENRQEARPEPARLKPPVHYNGPSKAGYVDFENGQWATDDIPDDLNSIRAAPGEFRAIMEMPSFYSHGLPRCSPYKKLTECQLKNPISGLLEYAQFASQTCEFNMIEQSGPPHEPRFKFQVVINGREFPPAEAGSKKVAKQDAAMKAMTILLEEAKAKDSGKSEESSHYSTEKESEKTAESQTPTPSATSFFSGKSPVTTLLECMHKLGNSCEFRLLSKEGPAHEPKFQYCVAVGAQTFPSVSAPSKKVAKQMAAEEAMKALHGEATNSMASDNQPEGMISESLDNLESMMPNKVRKIGELVRYLNTNPVGGLLEYARSHGFAAEFKLVDQSGPPHEPKFVYQAKVGGRWFPAVCAHSKKQGKQEAADAALRVLIGENEKAERMGFTEVTPVTGASLRRTMLLLSRSPEAQPKTLPLTGSTFHDQIAMLSHRCFNTLTNSFQPSLLGRKILAAIIMKKDSEDMGVVVSLGTGNRCVKGDSLSLKGETVNDCHAEIISRRGFIRFLYSELMKYNSQTAKDSIFEPAKGGEKLQIKKTVSFHLYISTAPCGDGALFDKSCSDRAMESTESRHYPVFENPKQGKLRTKVENGFGTIPVESYDIVPTWDGIRLGERLRTMSCSDKILRWNVLGLQGALLTHFLQPIYLKSVTLGYLFSQGHLTRAICCRVTRDGSAFEDGLRHPFIVNHPKVGRVSIYDSKRQSGKTKETSVNWCLADGYDLEILDGTRGTVDGPRNELSRVSKKNIFLLFKKLCSFRYRRDLLRLSYGEAKKAARDYETAKNYFKKGLKDMGYGNWISKPQEEKNFYLCPV

SEQ ID NO: 86 - protein, 1226 aa, Artificial Sequence
  ADAR Polypeptide Sequence
MNPRQGYSLSGYYTHPFQGYEHRQLRYQQPGPGSSPSSFLLKQIEFLKGQLPEAPVIGKQTPSLPPSLPGLRPRFPVLLASSTRGRQVDIRGVPRGVHLRSQGLQRGFQHPSPRGRSLPQRGVDCLSSHFQELSIYQDQEQRILKFLEELGEGKATTAHDLSGKLGTPKKEINRVLYSLAKKGKLQKEAGTPPLWKIAVSTQAWNQHSGVVRPDGHSQGAPNSDPSLEPEDRNSTSVSEDLLEPFIAVSAQAWNQHSGVVRPDSHSQGSPNSDPGLEPEDSNSTSALEDPLEFLDMAEIKEKICDYLFNVSDSSALNLAKNIGLTKARDINAVLIDMERQGDVYRQGTTPPIWHLTDKKRERMQIKRNTNSVPETAPAAIPETKRNAEFLTCNIPTSNASNNMVTTEKVENGQEPVIKLENRQEARPEPARLKPPVHYNGPSKAGYVDFENGQWATDDIPDDLNSIRAAPGEFRAIMEMPSFYSHGLPRCSPYKKLTECQLKNPISGLLEYAQFASQTCEFNMIEQSGPPHEPRFKFQVVINGREFPPAEAGSKKVAKQDAAMKAMTILLEEAKAKDSGKSEESSHYSTEKESEKTAESQTPTPSATSFFSGKSPVTTLLECMHKLGNSCEFRLLSKEGPAHEPKFQYCVAVGAQTFPSVSAPSKKVAKQMAAEEAMKALHGEATNSMASDNQPEGMISESLDNLESMMPNKVRKIGELVRYLNTNPVGGLLEYARSHGFAAEFKLVDQSGPPHEPKFVYQAKVGGRWFPAVCAHSKKQGKQEAADAALRVLIGENEKAERMGFTEVTPVTGASLRRTMLLLSRSPEAQPKTLPLTGSTFHDQIAMLSHRCFNTLTNSFQPSLLGRKILAAIIMKKDSEDMGVVVSLGTGNRCVKGDSLSLKGETVNDCHAEIISRRGFIRFLYSELMKYNSQTAKDSIFEPAKGGEKLQIKKTVSFHLYISTAPCGDGALFDKSCSDRAMESTESRHYPVFENPKQGKLRTKVENGLGTIPVESYDIVPTWDGIRLGERLRTMSCSDKILRWNVLGLQGALLTHFLQPIYLKSVTLGYLFSQGHLTRAICCRVTRDGSAFEDGLRHPFIVNHPKVGRVSIYDSKRQSGKTKETSVNWCLADGYDLEILDGTRGTVDGPRNELSRVSKKNIFLLFKKLCSFRYRRDLLRLSYGEAKKAARDYETAKNYFKKGLKDMGYGNWISKPQEEKNFYLCPV

SEQ ID NO: 87 - protein, 1226 aa, Artificial Sequence
  ADAR Polypeptide Sequence
MNPRQGYSLSGYYTHPFQGYEHRQLRYQQPGPGSSPSSFLLKQIEFLKGQLPEAPVIGKQTPSLPPSLPGLRPRFPVLLASSTRGRQVDIRGVPRGVHLRSQGLQRGFQHPSPRGRSLPQRGVDCLSSHFQELSIYQDQEQRILKFLEELGEGKATTAHDLSGKLGTPKKEINRVLYSLAKKGKLQKEAGTPPLWKIAVSTQAWNQHSGVVRPDGHSQGAPNSDPSLEPEDRNSTSVSEDLLEPFIAVSAQAWNQHSGVVRPDSHSQGSPNSDPGLEPEDSNSTSALEDPLEFLDMAEIKEKICDYLFNVSDSSALNLAKNIGLTKARDINAVLIDMERQGDVYRQGTTPPIWHLTDKKRERMQIKRNTNSVPETAPAAIPETKRNAEFLTCNIPTSNASNNMVTTEKVENGQEPVIKLENRQEARPEPARLKPPVHYNGPSKAGYVDFENGQWATDDIPDDLNSIRAAPGEFRAIMEMPSFYSHGLPRCSPYKKLTECQLKNPISGLLEYAQFASQTCEFNMIEQSGPPHEPRFKFQVVINGREFPPAEAGSKKVAKQDAAMKAMTILLEEAKAKDSGKSEESSHYSTEKESEKTAESQTPTPSATSFFSGKSPVTTLLECMHKLGNSCEFRLLSKEGPAHEPKFQYCVAVGAQTFPSVSAPSKKVAKQMAAEEAMKALHGEATNSMASDNQPEGMISESLDNLESMMPNKVRKIGELVRYLNTNPVGGLLEYARSHGFAAEFKLVDQSGPPHEPKFVYQAKVGGRWFPAVCAHSKKQGKQEAADAALRVLIGENEKAERMGFTEVTPVTGASLRRTMLLLSRSPEAQPKTLPLTGSTFHDQIAMLSHRCFNTLTNSFQPSLLGRKILAAIIMKKDSEDMGVVVSLGTGNRCVKGDSLSLKGETVNDCHAEIISRRGFIRFLYSELMKYNSQTAKDSIFEPAKGGEKLQIKKTVSFHLYISTAPCGDGALFDKSCSDRAMESTESRHYPVFENPKQGKLRTKVENGWGTIPVESYDIVPTWDGIRLGERLRTMSCSDKILRWNVLGLQGALLTHFLQPIYLKSVTLGYLFSQGHLTRAICCRVTRDGSAFEDGLRHPFIVNHPKVGRVSIYDSKRQSGKTKETSVNWCLADGYDLEILDGTRGTVDGPRNELSRVSKKNIFLLFKKLCSFRYRRDLLRLSYGEAKKAARDYETAKNYFKKGLKDMGYGNWISKPQEEKNFYLCPV

SEQ ID NO: 88 - protein, 1226 aa, Artificial Sequence
  ADAR Polypeptide Sequence
MNPRQGYSLSGYYTHPFQGYEHRQLRYQQPGPGSSPSSFLLKQIEFLKGQLPEAPVIGKQTPSLPPSLPGLRPRFPVLLASSTRGRQVDIRGVPRGVHLRSQGLQRGFQHPSPRGRSLPQRGVDCLSSHFQELSIYQDQEQRILKFLEELGEGKATTAHDLSGKLGTPKKEINRVLYSLAKKGKLQKEAGTPPLWKIAVSTQAWNQHSGVVRPDGHSQGAPNSDPSLEPEDRNSTSVSEDLLEPFIAVSAQAWNQHSGVVRPDSHSQGSPNSDPGLEPEDSNSTSALEDPLEFLDMAEIKEKICDYLFNVSDSSALNLAKNIGLTKARDINAVLIDMERQGDVYRQGTTPPIWHLTDKKRERMQIKRNTNSVPETAPAAIPETKRNAEFLTCNIPTSNASNNMVTTEKVENGQEPVIKLENRQEARPEPARLKPPVHYNGPSKAGYVDFENGQWATDDIPDDLNSIRAAPGEFRAIMEMPSFYSHGLPRCSPYKKLTECQLKNPISGLLEYAQFASQTCEFNMIEQSGPPHEPRFKFQVVINGREFPPAEAGSKKVAKQDAAMKAMTILLEEAKAKDSGKSEESSHYSTEKESEKTAESQTPTPSATSFFSGKSPVTTLLECMHKLGNSCEFRLLSKEGPAHEPKFQYCVAVGAQTFPSVSAPSKKVAKQMAAEEAMKALHGEATNSMASDNQPEGMISESLDNLESMMPNKVRKIGELVRYLNTNPVGGLLEYARSHGFAAEFKLVDQSGPPHEPKFVYQAKVGGRWFPAVCAHSKKQGKQEAADAALRVLIGENEKAERMGFTEVTPVTGASLRRTMLLLSRSPEAQPKTLPLTGSTFHDQIAMLSHRCFNTLTNSFQPSLLGRKILAAIIMKKDSEDMGVVVSLGTGNRCVKGDSLSLKGETVNDCHAEIISRRGFIRFLYSELMKYNSQTAKDSIFEPAKGGEKLQIKKTVSFHLYISTAPCGDGALFDKSCSDRAMESTESRHYPVFENPKQGKLRTKVENGQGTIPVESSDIVPTWDGIRLGERLRTMSCSDKILRWNVLGLQGALLTHFLQPIYLKSVTLGYLFSQGHLTRAICCRVTRDGSAFEDGLRHPFIVNHPKVGRVSIYDSKRQSGKTKETSVNWCLADGYDLEILDGTRGTVDGPRNELSRVSKKNIFLLFKKLCSFRYRRDLLRLSYGEAKKAARDYETAKNYFKKGLKDMGYGNWISKPQEEKNFYLCPV

SEQ ID NO: 89 - protein, 1226 aa, Artificial Sequence
  ADAR Polypeptide Sequence
MNPRQGYSLSGYYTHPFQGYEHRQLRYQQPGPGSSPSSFLLKQIEFLKGQLPEAPVIGKQTPSLPPSLPGLRPRFPVLLASSTRGRQVDIRGVPRGVHLRSQGLQRGFQHPSPRGRSLPQRGVDCLSSHFQELSIYQDQEQRILKFLEELGEGKATTAHDLSGKLGTPKKEINRVLYSLAKKGKLQKEAGTPPLWKIAVSTQAWNQHSGVVRPDGHSQGAPNSDPSLEPEDRNSTSVSEDLLEPFIAVSAQAWNQHSGVVRPDSHSQGSPNSDPGLEPEDSNSTSALEDPLEFLDMAEIKEKICDYLFNVSDSSALNLAKNIGLTKARDINAVLIDMERQGDVYRQGTTPPIWHLTDKKRERMQIKRNTNSVPETAPAAIPETKRNAEFLTCNIPTSNASNNMVTTEKVENGQEPVIKLENRQEARPEPARLKPPVHYNGPSKAGYVDFENGQWATDDIPDDLNSIRAAPGEFRAIMEMPSFYSHGLPRCSPYKKLTECQLKNPISGLLEYAQFASQTCEFNMIEQSGPPHEPRFKFQVVINGREFPPAEAGSKKVAKQDAAMKAMTILLEEAKAKDSGKSEESSHYSTEKESEKTAESQTPTPSATSFFSGKSPVTTLLECMHKLGNSCEFRLLSKEGPAHEPKFQYCVAVGAQTFPSVSAPSKKVAKQMAAEEAMKALHGEATNSMASDNQPEGMISESLDNLESMMPNKVRKIGELVRYLNTNPVGGLLEYARSHGFAAEFKLVDQSGPPHEPKFVYQAKVGGRWFPAVCAHSKKQGKQEAADAALRVLIGENEKAERMGFTEVTPVTGASLRRTMLLLSRSPEAQPKTLPLTGSTFHDQIAMLSHRCFNTLTNSFQPSLLGRKILAAIIMKKDSEDMGVVVSLGTGNRCVKGDSLSLKGETVNDCHAEIISRRGFIRFLYSELMKYNSQTAKDSIFEPAKGGEKLQIKKTVSFHLYISTAPCGDGALFDKSCSDRAMESTESRHYPVFENPKQGKLRTKVENGHGTIPVESSDIVPTWDGIRLGERLRTMSCSDKILRWNVLGLQGALLTHFLQPIYLKSVTLGYLFSQGHLTRAICCRVTRDGSAFEDGLRHPFIVNHPKVGRVSIYDSKRQSGKTKETSVNWCLADGYDLEILDGTRGTVDGPRNELSRVSKKNIFLLFKKLCSFRYRRDLLRLSYGEAKKAARDYETAKNYFKKGLKDMGYGNWISKPQEEKNFYLCPV

SEQ ID NO: 90 - protein, 1226 aa, Artificial Sequence
  ADAR Polypeptide Sequence
MNPRQGYSLSGYYTHPFQGYEHRQLRYQQPGPGSSPSSFLLKQIEFLKGQLPEAPVIGKQTPSLPPSLPGLRPRFPVLLASSTRGRQVDIRGVPRGVHLRSQGLQRGFQHPSPRGRSLPQRGVDCLSSHFQELSIYQDQEQRILKFLEELGEGKATTAHDLSGKLGTPKKEINRVLYSLAKKGKLQKEAGTPPLWKIAVSTQAWNQHSGVVRPDGHSQGAPNSDPSLEPEDRNSTSVSEDLLEPFIAVSAQAWNQHSGVVRPDSHSQGSPNSDPGLEPEDSNSTSALEDPLEFLDMAEIKEKICDYLFNVSDSSALNLAKNIGLTKARDINAVLIDMERQGDVYRQGTTPPIWHLTDKKRERMQIKRNTNSVPETAPAAIPETKRNAEFLTCNIPTSNASNNMVTTEKVENGQEPVIKLENRQEARPEPARLKPPVHYNGPSKAGYVDFENGQWATDDIPDDLNSIRAAPGEFRAIMEMPSFYSHGLPRCSPYKKLTECQLKNPISGLLEYAQFASQTCEFNMIEQSGPPHEPRFKFQVVINGREFPPAEAGSKKVAKQDAAMKAMTILLEEAKAKDSGKSEESSHYSTEKESEKTAESQTPTPSATSFFSGKSPVTTLLECMHKLGNSCEFRLLSKEGPAHEPKFQYCVAVGAQTFPSVSAPSKKVAKQMAAEEAMKALHGEATNSMASDNQPEGMISESLDNLESMMPNKVRKIGELVRYLNTNPVGGLLEYARSHGFAAEFKLVDQSGPPHEPKFVYQAKVGGRWFPAVCAHSKKQGKQEAADAALRVLIGENEKAERMGFTEVTPVTGASLRRTMLLLSRSPEAQPKTLPLTGSTFHDQIAMLSHRCFNTLTNSFQPSLLGRKILAAIIMKKDSEDMGVVVSLGTGNRCVKGDSLSLKGETVNDCHAEIISRRGFIRFLYSELMKYNSQTAKDSIFEPAKGGEKLQIKKTVSFHLYISTAPCGDGALFDKSCSDRAMESTESRHYPVFENPKQGKLRTKVENGRGTIPVESSDIVPTWDGIRLGERLRTMSCSDKILRWNVLGLQGALLTHFLQPIYLKSVTLGYLFSQGHLTRAICCRVTRDGSAFEDGLRHPFIVNHPKVGRVSIYDSKRQSGKTKETSVNWCLADGYDLEILDGTRGTVDGPRNELSRVSKKNIFLLFKKLCSFRYRRDLLRLSYGEAKKAARDYETAKNYFKKGLKDMGYGNWISKPQEEKNFYLCPV

SEQ ID NO: 91 - protein, 1226 aa, Artificial Sequence
  ADAR Polypeptide Sequence
MNPRQGYSLSGYYTHPFQGYEHRQLRYQQPGPGSSPSSFLLKQIEFLKGQLPEAPVIGKQTPSLPPSLPGLRPRFPVLLASSTRGRQVDIRGVPRGVHLRSQGLQRGFQHPSPRGRSLPQRGVDCLSSHFQELSIYQDQEQRILKFLEELGEGKATTAHDLSGKLGTPKKEINRVLYSLAKKGKLQKEAGTPPLWKIAVSTQAWNQHSGVVRPDGHSQGAPNSDPSLEPEDRNSTSVSEDLLEPFIAVSAQAWNQHSGVVRPDSHSQGSPNSDPGLEPEDSNSTSALEDPLEFLDMAEIKEKICDYLFNVSDSSALNLAKNIGLTKARDINAVLIDMERQGDVYRQGTTPPIWHLTDKKRERMQIKRNTNSVPETAPAAIPETKRNAEFLTCNIPTSNASNNMVTTEKVENGQEPVIKLENRQEARPEPARLKPPVHYNGPSKAGYVDFENGQWATDDIPDDLNSIRAAPGEFRAIMEMPSFYSHGLPRCSPYKKLTECQLKNPISGLLEYAQFASQTCEFNMIEQSGPPHEPRFKFQVVINGREFPPAEAGSKKVAKQDAAMKAMTILLEEAKAKDSGKSEESSHYSTEKESEKTAESQTPTPSATSFFSGKSPVTTLLECMHKLGNSCEFRLLSKEGPAHEPKFQYCVAVGAQTFPSVSAPSKKVAKQMAAEEAMKALHGEATNSMASDNQPEGMISESLDNLESMMPNKVRKIGELVRYLNTNPVGGLLEYARSHGFAAEFKLVDQSGPPHEPKFVYQAKVGGRWFPAVCAHSKKQGKQEAADAALRVLIGENEKAERMGFTEVTPVTGASLRRTMLLLSRSPEAQPKTLPLTGSTFHDQIAMLSHRCFNTLTNSFQPSLLGRKILAAIIMKKDSEDMGVVVSLGTGNRCVKGDSLSLKGETVNDCHAEIISRRGFIRFLYSELMKYNSQTAKDSIFEPAKGGEKLQIKKTVSFHLYISTAPCGDGALFDKSCSDRAMESTESRHYPVFENPKQGKLRTKVENGKGTIPVESSDIVPTWDGIRLGERLRTMSCSDKILRWNVLGLQGALLTHFLQPIYLKSVTLGYLFSQGHLTRAICCRVTRDGSAFEDGLRHPFIVNHPKVGRVSIYDSKRQSGKTKETSVNWCLADGYDLEILDGTRGTVDGPRNELSRVSKKNIFLLFKKLCSFRYRRDLLRLSYGEAKKAARDYETAKNYFKKGLKDMGYGNWISKPQEEKNFYLCPV

SEQ ID NO: 92 - protein, 1226 aa, Artificial Sequence
  ADAR Polypeptide Sequence
MNPRQGYSLSGYYTHPFQGYEHRQLRYQQPGPGSSPSSFLLKQIEFLKGQLPEAPVIGKQTPSLPPSLPGLRPRFPVLLASSTRGRQVDIRGVPRGVHLRSQGLQRGFQHPSPRGRSLPQRGVDCLSSHFQELSIYQDQEQRILKFLEELGEGKATTAHDLSGKLGTPKKEINRVLYSLAKKGKLQKEAGTPPLWKIAVSTQAWNQHSGVVRPDGHSQGAPNSDPSLEPEDRNSTSVSEDLLEPFIAVSAQAWNQHSGVVRPDSHSQGSPNSDPGLEPEDSNSTSALEDPLEFLDMAEIKEKICDYLFNVSDSSALNLAKNIGLTKARDINAVLIDMERQGDVYRQGTTPPIWHLTDKKRERMQIKRNTNSVPETAPAAIPETKRNAEFLTCNIPTSNASNNMVTTEKVENGQEPVIKLENRQEARPEPARLKPPVHYNGPSKAGYVDFENGQWATDDIPDDLNSIRAAPGEFRAIMEMPSFYSHGLPRCSPYKKLTECQLKNPISGLLEYAQFASQTCEFNMIEQSGPPHEPRFKFQVVINGREFPPAEAGSKKVAKQDAAMKAMTILLEEAKAKDSGKSEESSHYSTEKESEKTAESQTPTPSATSFFSGKSPVTTLLECMHKLGNSCEFRLLSKEGPAHEPKFQYCVAVGAQTFPSVSAPSKKVAKQMAAEEAMKALHGEATNSMASDNQPEGMISESLDNLESMMPNKVRKIGELVRYLNTNPVGGLLEYARSHGFAAEFKLVDQSGPPHEPKFVYQAKVGGRWFPAVCAHSKKQGKQEAADAALRVLIGENEKAERMGFTEVTPVTGASLRRTMLLLSRSPEAQPKTLPLTGSTFHDQIAMLSHRCFNTLTNSFQPSLLGRKILAAIIMKKDSEDMGVVVSLGTGNRCVKGDSLSLKGETVNDCHAEIISRRGFIRFLYSELMKYNSQTAKDSIFEPAKGGEKLQIKKTVSFHLYISTAPCGDGALFDKSCSDRAMESTESRHYPVFENPKQGKLRTKVENGNGTIPVESSDIVPTWDGIRLGERLRTMSCSDKILRWNVLGLQGALLTHFLQPIYLKSVTLGYLFSQGHLTRAICCRVTRDGSAFEDGLRHPFIVNHPKVGRVSIYDSKRQSGKTKETSVNWCLADGYDLEILDGTRGTVDGPRNELSRVSKKNIFLLFKKLCSFRYRRDLLRLSYGEAKKAARDYETAKNYFKKGLKDMGYGNWISKPQEEKNFYLCPV

SEQ ID NO: 93 - protein, 1226 aa, Artificial Sequence
  ADAR Polypeptide Sequence
MNPRQGYSLSGYYTHPFQGYEHRQLRYQQPGPGSSPSSFLLKQIEFLKGQLPEAPVIGKQTPSLPPSLPGLRPRFPVLLASSTRGRQVDIRGVPRGVHLRSQGLQRGFQHPSPRGRSLPQRGVDCLSSHFQELSIYQDQEQRILKFLEELGEGKATTAHDLSGKLGTPKKEINRVLYSLAKKGKLQKEAGTPPLWKIAVSTQAWNQHSGVVRPDGHSQGAPNSDPSLEPEDRNSTSVSEDLLEPFIAVSAQAWNQHSGVVRPDSHSQGSPNSDPGLEPEDSNSTSALEDPLEFLDMAEIKEKICDYLFNVSDSSALNLAKNIGLTKARDINAVLIDMERQGDVYRQGTTPPIWHLTDKKRERMQIKRNTNSVPETAPAAIPETKRNAEFLTCNIPTSNASNNMVTTEKVENGQEPVIKLENRQEARPEPARLKPPVHYNGPSKAGYVDFENGQWATDDIPDDLNSIRAAPGEFRAIMEMPSFYSHGLPRCSPYKKLTECQLKNPISGLLEYAQFASQTCEFNMIEQSGPPHEPRFKFQVVINGREFPPAEAGSKKVAKQDAAMKAMTILLEEAKAKDSGKSEESSHYSTEKESEKTAESQTPTPSATSFFSGKSPVTTLLECMHKLGNSCEFRLLSKEGPAHEPKFQYCVAVGAQTFPSVSAPSKKVAKQMAAEEAMKALHGEATNSMASDNQPEGMISESLDNLESMMPNKVRKIGELVRYLNTNPVGGLLEYARSHGFAAEFKLVDQSGPPHEPKFVYQAKVGGRWFPAVCAHSKKQGKQEAADAALRVLIGENEKAERMGFTEVTPVTGASLRRTMLLLSRSPEAQPKTLPLTGSTFHDQIAMLSHRCFNTLTNSFQPSLLGRKILAAIIMKKDSEDMGVVVSLGTGNRCVKGDSLSLKGETVNDCHAEIISRRGFIRFLYSELMKYNSQTAKDSIFEPAKGGEKLQIKKTVSFHLYISTAPCGDGALFDKSCSDRAMESTESRHYPVFENPKQGKLRTKVENGAGTIPVESSDIVPTWDGIRLGERLRTMSCSDKILRWNVLGLQGALLTHFLQPIYLKSVTLGYLFSQGHLTRAICCRVTRDGSAFEDGLRHPFIVNHPKVGRVSIYDSKRQSGKTKETSVNWCLADGYDLEILDGTRGTVDGPRNELSRVSKKNIFLLFKKLCSFRYRRDLLRLSYGEAKKAARDYETAKNYFKKGLKDMGYGNWISKPQEEKNFYLCPV

SEQ ID NO: 94 - protein, 1226 aa, Artificial Sequence
  ADAR Polypeptide Sequence
MNPRQGYSLSGYYTHPFQGYEHRQLRYQQPGPGSSPSSFLLKQIEFLKGQLPEAPVIGKQTPSLPPSLPGLRPRFPVLLASSTRGRQVDIRGVPRGVHLRSQGLQRGFQHPSPRGRSLPQRGVDCLSSHFQELSIYQDQEQRILKFLEELGEGKATTAHDLSGKLGTPKKEINRVLYSLAKKGKLQKEAGTPPLWKIAVSTQAWNQHSGVVRPDGHSQGAPNSDPSLEPEDRNSTSVSEDLLEPFIAVSAQAWNQHSGVVRPDSHSQGSPNSDPGLEPEDSNSTSALEDPLEFLDMAEIKEKICDYLFNVSDSSALNLAKNIGLTKARDINAVLIDMERQGDVYRQGTTPPIWHLTDKKRERMQIKRNTNSVPETAPAAIPETKRNAEFLTCNIPTSNASNNMVTTEKVENGQEPVIKLENRQEARPEPARLKPPVHYNGPSKAGYVDFENGQWATDDIPDDLNSIRAAPGEFRAIMEMPSFYSHGLPRCSPYKKLTECQLKNPISGLLEYAQFASQTCEFNMIEQSGPPHEPRFKFQVVINGREFPPAEAGSKKVAKQDAAMKAMTILLEEAKAKDSGKSEESSHYSTEKESEKTAESQTPTPSATSFFSGKSPVTTLLECMHKLGNSCEFRLLSKEGPAHEPKFQYCVAVGAQTFPSVSAPSKKVAKQMAAEEAMKALHGEATNSMASDNQPEGMISESLDNLESMMPNKVRKIGELVRYLNTNPVGGLLEYARSHGFAAEFKLVDQSGPPHEPKFVYQAKVGGRWFPAVCAHSKKQGKQEAADAALRVLIGENEKAERMGFTEVTPVTGASLRRTMLLLSRSPEAQPKTLPLTGSTFHDQIAMLSHRCFNTLTNSFQPSLLGRKILAAIIMKKDSEDMGVVVSLGTGNRCVKGDSLSLKGETVNDCHAEIISRRGFIRFLYSELMKYNSQTAKDSIFEPAKGGEKLQIKKTVSFHLYISTAPCGDGALFDKSCSDRAMESTESRHYPVFENPKQGKLRTKVENGMGTIPVESSDIVPTWDGIRLGERLRTMSCSDKILRWNVLGLQGALLTHFLQPIYLKSVTLGYLFSQGHLTRAICCRVTRDGSAFEDGLRHPFIVNHPKVGRVSIYDSKRQSGKTKETSVNWCLADGYDLEILDGTRGTVDGPRNELSRVSKKNIFLLFKKLCSFRYRRDLLRLSYGEAKKAARDYETAKNYFKKGLKDMGYGNWISKPQEEKNFYLCPV

SEQ ID NO: 95 - protein, 1226 aa, Artificial Sequence
  ADAR Polypeptide Sequence
MNPRQGYSLSGYYTHPFQGYEHRQLRYQQPGPGSSPSSFLLKQIEFLKGQLPEAPVIGKQTPSLPPSLPGLRPRFPVLLASSTRGRQVDIRGVPRGVHLRSQGLQRGFQHPSPRGRSLPQRGVDCLSSHFQELSIYQDQEQRILKFLEELGEGKATTAHDLSGKLGTPKKEINRVLYSLAKKGKLQKEAGTPPLWKIAVSTQAWNQHSGVVRPDGHSQGAPNSDPSLEPEDRNSTSVSEDLLEPFIAVSAQAWNQHSGVVRPDSHSQGSPNSDPGLEPEDSNSTSALEDPLEFLDMAEIKEKICDYLFNVSDSSALNLAKNIGLTKARDINAVLIDMERQGDVYRQGTTPPIWHLTDKKRERMQIKRNTNSVPETAPAAIPETKRNAEFLTCNIPTSNASNNMVTTEKVENGQEPVIKLENRQEARPEPARLKPPVHYNGPSKAGYVDFENGQWATDDIPDDLNSIRAAPGEFRAIMEMPSFYSHGLPRCSPYKKLTECQLKNPISGLLEYAQFASQTCEFNMIEQSGPPHEPRFKFQVVINGREFPPAEAGSKKVAKQDAAMKAMTILLEEAKAKDSGKSEESSHYSTEKESEKTAESQTPTPSATSFFSGKSPVTTLLECMHKLGNSCEFRLLSKEGPAHEPKFQYCVAVGAQTFPSVSAPSKKVAKQMAAEEAMKALHGEATNSMASDNQPEGMISESLDNLESMMPNKVRKIGELVRYLNTNPVGGLLEYARSHGFAAEFKLVDQSGPPHEPKFVYQAKVGGRWFPAVCAHSKKQGKQEAADAALRVLIGENEKAERMGFTEVTPVTGASLRRTMLLLSRSPEAQPKTLPLTGSTFHDQIAMLSHRCFNTLTNSFQPSLLGRKILAAIIMKKDSEDMGVVVSLGTGNRCVKGDSLSLKGETVNDCHAEIISRRGFIRFLYSELMKYNSQTAKDSIFEPAKGGEKLQIKKTVSFHLYISTAPCGDGALFDKSCSDRAMESTESRHYPVFENPKQGKLRTKVENGSGTIPVESSDIVPTWDGIRLGERLRTMSCSDKILRWNVLGLQGALLTHFLQPIYLKSVTLGYLFSQGHLTRAICCRVTRDGSAFEDGLRHPFIVNHPKVGRVSIYDSKRQSGKTKETSVNWCLADGYDLEILDGTRGTVDGPRNELSRVSKKNIFLLFKKLCSFRYRRDLLRLSYGEAKKAARDYETAKNYFKKGLKDMGYGNWISKPQEEKNFYLCPV

SEQ ID NO: 96 - protein, 1226 aa, Artificial Sequence
  ADAR Polypeptide Sequence
MNPRQGYSLSGYYTHPFQGYEHRQLRYQQPGPGSSPSSFLLKQIEFLKGQLPEAPVIGKQTPSLPPSLPGLRPRFPVLLASSTRGRQVDIRGVPRGVHLRSQGLQRGFQHPSPRGRSLPQRGVDCLSSHFQELSIYQDQEQRILKFLEELGEGKATTAHDLSGKLGTPKKEINRVLYSLAKKGKLQKEAGTPPLWKIAVSTQAWNQHSGVVRPDGHSQGAPNSDPSLEPEDRNSTSVSEDLLEPFIAVSAQAWNQHSGVVRPDSHSQGSPNSDPGLEPEDSNSTSALEDPLEFLDMAEIKEKICDYLFNVSDSSALNLAKNIGLTKARDINAVLIDMERQGDVYRQGTTPPIWHLTDKKRERMQIKRNTNSVPETAPAAIPETKRNAEFLTCNIPTSNASNNMVTTEKVENGQEPVIKLENRQEARPEPARLKPPVHYNGPSKAGYVDFENGQWATDDIPDDLNSIRAAPGEFRAIMEMPSFYSHGLPRCSPYKKLTECQLKNPISGLLEYAQFASQTCEFNMIEQSGPPHEPRFKFQVVINGREFPPAEAGSKKVAKQDAAMKAMTILLEEAKAKDSGKSEESSHYSTEKESEKTAESQTPTPSATSFFSGKSPVTTLLECMHKLGNSCEFRLLSKEGPAHEPKFQYCVAVGAQTFPSVSAPSKKVAKQMAAEEAMKALHGEATNSMASDNQPEGMISESLDNLESMMPNKVRKIGELVRYLNTNPVGGLLEYARSHGFAAEFKLVDQSGPPHEPKFVYQAKVGGRWFPAVCAHSKKQGKQEAADAALRVLIGENEKAERMGFTEVTPVTGASLRRTMLLLSRSPEAQPKTLPLTGSTFHDQIAMLSHRCFNTLTNSFQPSLLGRKILAAIIMKKDSEDMGVVVSLGTGNRCVKGDSLSLKGETVNDCHAEIISRRGFIRFLYSELMKYNSQTAKDSIFEPAKGGEKLQIKKTVSFHLYISTAPCGDGALFDKSCSDRAMESTESRHYPVFENPKQGKLRTKVENGFGTIPVESSDIVPTWDGIRLGERLRTMSCSDKILRWNVLGLQGALLTHFLQPIYLKSVTLGYLFSQGHLTRAICCRVTRDGSAFEDGLRHPFIVNHPKVGRVSIYDSKRQSGKTKETSVNWCLADGYDLEILDGTRGTVDGPRNELSRVSKKNIFLLFKKLCSFRYRRDLLRLSYGEAKKAARDYETAKNYFKKGLKDMGYGNWISKPQEEKNFYLCPV

SEQ ID NO: 97 - protein, 1226 aa, Artificial Sequence
  ADAR Polypeptide Sequence
MNPRQGYSLSGYYTHPFQGYEHRQLRYQQPGPGSSPSSFLLKQIEFLKGQLPEAPVIGKQTPSLPPSLPGLRPRFPVLLASSTRGRQVDIRGVPRGVHLRSQGLQRGFQHPSPRGRSLPQRGVDCLSSHFQELSIYQDQEQRILKFLEELGEGKATTAHDLSGKLGTPKKEINRVLYSLAKKGKLQKEAGTPPLWKIAVSTQAWNQHSGVVRPDGHSQGAPNSDPSLEPEDRNSTSVSEDLLEPFIAVSAQAWNQHSGVVRPDSHSQGSPNSDPGLEPEDSNSTSALEDPLEFLDMAEIKEKICDYLFNVSDSSALNLAKNIGLTKARDINAVLIDMERQGDVYRQGTTPPIWHLTDKKRERMQIKRNTNSVPETAPAAIPETKRNAEFLTCNIPTSNASNNMVTTEKVENGQEPVIKLENRQEARPEPARLKPPVHYNGPSKAGYVDFENGQWATDDIPDDLNSIRAAPGEFRAIMEMPSFYSHGLPRCSPYKKLTECQLKNPISGLLEYAQFASQTCEFNMIEQSGPPHEPRFKFQVVINGREFPPAEAGSKKVAKQDAAMKAMTILLEEAKAKDSGKSEESSHYSTEKESEKTAESQTPTPSATSFFSGKSPVTTLLECMHKLGNSCEFRLLSKEGPAHEPKFQYCVAVGAQTFPSVSAPSKKVAKQMAAEEAMKALHGEATNSMASDNQPEGMISESLDNLESMMPNKVRKIGELVRYLNTNPVGGLLEYARSHGFAAEFKLVDQSGPPHEPKFVYQAKVGGRWFPAVCAHSKKQGKQEAADAALRVLIGENEKAERMGFTEVTPVTGASLRRTMLLLSRSPEAQPKTLPLTGSTFHDQIAMLSHRCFNTLTNSFQPSLLGRKILAAIIMKKDSEDMGVVVSLGTGNRCVKGDSLSLKGETVNDCHAEIISRRGFIRFLYSELMKYNSQTAKDSIFEPAKGGEKLQIKKTVSFHLYISTAPCGDGALFDKSCSDRAMESTESRHYPVFENPKQGKLRTKVENGLGTIPVESSDIVPTWDGIRLGERLRTMSCSDKILRWNVLGLQGALLTHFLQPIYLKSVTLGYLFSQGHLTRAICCRVTRDGSAFEDGLRHPFIVNHPKVGRVSIYDSKRQSGKTKETSVNWCLADGYDLEILDGTRGTVDGPRNELSRVSKKNIFLLFKKLCSFRYRRDLLRLSYGEAKKAARDYETAKNYFKKGLKDMGYGNWISKPQEEKNFYLCPV

SEQ ID NO: 98 - protein, 1226 aa, Artificial Sequence
  ADAR Polypeptide Sequence
MNPRQGYSLSGYYTHPFQGYEHRQLRYQQPGPGSSPSSFLLKQIEFLKGQLPEAPVIGKQTPSLPPSLPGLRPRFPVLLASSTRGRQVDIRGVPRGVHLRSQGLQRGFQHPSPRGRSLPQRGVDCLSSHFQELSIYQDQEQRILKFLEELGEGKATTAHDLSGKLGTPKKEINRVLYSLAKKGKLQKEAGTPPLWKIAVSTQAWNQHSGVVRPDGHSQGAPNSDPSLEPEDRNSTSVSEDLLEPFIAVSAQAWNQHSGVVRPDSHSQGSPNSDPGLEPEDSNSTSALEDPLEFLDMAEIKEKICDYLFNVSDSSALNLAKNIGLTKARDINAVLIDMERQGDVYRQGTTPPIWHLTDKKRERMQIKRNTNSVPETAPAAIPETKRNAEFLTCNIPTSNASNNMVTTEKVENGQEPVIKLENRQEARPEPARLKPPVHYNGPSKAGYVDFENGQWATDDIPDDLNSIRAAPGEFRAIMEMPSFYSHGLPRCSPYKKLTECQLKNPISGLLEYAQFASQTCEFNMIEQSGPPHEPRFKFQVVINGREFPPAEAGSKKVAKQDAAMKAMTILLEEAKAKDSGKSEESSHYSTEKESEKTAESQTPTPSATSFFSGKSPVTTLLECMHKLGNSCEFRLLSKEGPAHEPKFQYCVAVGAQTFPSVSAPSKKVAKQMAAEEAMKALHGEATNSMASDNQPEGMISESLDNLESMMPNKVRKIGELVRYLNTNPVGGLLEYARSHGFAAEFKLVDQSGPPHEPKFVYQAKVGGRWFPAVCAHSKKQGKQEAADAALRVLIGENEKAERMGFTEVTPVTGASLRRTMLLLSRSPEAQPKTLPLTGSTFHDQIAMLSHRCFNTLTNSFQPSLLGRKILAAIIMKKDSEDMGVVVSLGTGNRCVKGDSLSLKGETVNDCHAEIISRRGFIRFLYSELMKYNSQTAKDSIFEPAKGGEKLQIKKTVSFHLYISTAPCGDGALFDKSCSDRAMESTESRHYPVFENPKQGKLRTKVENGWGTIPVESSDIVPTWDGIRLGERLRTMSCSDKILRWNVLGLQGALLTHFLQPIYLKSVTLGYLFSQGHLTRAICCRVTRDGSAFEDGLRHPFIVNHPKVGRVSIYDSKRQSGKTKETSVNWCLADGYDLEILDGTRGTVDGPRNELSRVSKKNIFLLFKKLCSFRYRRDLLRLSYGEAKKAARDYETAKNYFKKGLKDMGYGNWISKPQEEKNFYLCPV
